United States Patent Application Publication US 2005/0255114 A1 - sequence listing, part 2

SEQ ID NO: 1070 - protein, 1377 aa, Homo sapiens
SGGRPGARVGGSRPRPRPLRPSPQTPGRRARAARPEAPAMASPPRHGPPGPASGDGPNLNNNNNNNNNHSVRKCGYLRNEEHGHKRFFVLRGPGAGGDEATAGGGSAPQPPRLEYYESEKKWRSKAGAPKRVIALDCCLNINKRADAKHKYLIALYTKDEYFAVAAENEQEQEGWYRALTDLVSEGRAAAGDAPPAAAPAASCSASLPGALGGSAGAAGAEDSYGLVAPATAAYREVWQVNLKPKGLGQSKNLTGVYRLCLSARTIGFVKLNCEQPSVTLQLMNIRRCGHSDSFFFIEVGRSAVTGPGELWMQADDSVVAQNIHETILEAMKALKELFEFRPRSKSQSSGSSATHPISVPGARRHHHLVNLPPSQTGLVRRSRTDSLAATPPAAKCSSCRVRTASEGDGGRAAGAAAAAQRLVSVAGSPLSPGPVRAPLSRSHTLSGGCGGRGSKVALLPAGGALQHSRSMSMPVAHSPPAATSPGSLSSSSGHGSGSYPPPPGPHPPLPHPLHHGPGQRPSSGSASASGSPSDPGFMSLDEYGSSPGDLRAFCSHRSNTPESIAETPPARDGGGGGEFYGYMTMDRPLSHCGRSYRRVSGDAAQDLDRGLRKRTYSLTTPARQRPVPQPSSASLDEYTLMRATFSGSAGRLCPSCPASSPKVAYHPYPEDYGDIEIGSHRSSSSNLGADDGYMPMTPGAAFAGSGSGSCRSDDYMPMSPASVSAPKQILQPRAAAAAAAAVPSAGPAGPAPTSAAGRTFPASGGGYKASSPAESSPEDSGYMRMWCGSKLSMEHADGKLLPNGDYLNVSPSDAVTTGTPPDFFSAALHPGGEPLRGVPGCCYSSLPRSYKAPYTCGGDSDQYVLMSSPVGRILEEERLEPQATPGPSQAASAFGAGPTQPPHPVVPSPVRRSGRRSGFLGQRGRAVRPTRLSLEGLPSLPSMHEYPLPPEPKSPGEYINIDFGEPGARLSPPAPPLLASAASSSSLLSASSPASSLGSGTPGTSSDSRQRSPLSDYMNLDFSSPKSPKPGAPSGHPVGSLDGLLSPEASSPYPPLPPRPSASPSSSLQPPPPPPAPGELYRLPPASAVATAQGPGAASSLSSDTGDNGDYTEMAFGVAATPPQPIAAPPKPEAARVASPTSGVKRLSLMEQVSGVEAFLQASQPPDPHRGAKVIRADPQGGRRRHSSETFSSTTTVTPVSPSFAHNPKRHNSASVENVSLRKSSEGGVGVGPGGGDEPPTSPRQLQPAPPLAPQGRPWTPGQPGGLVGCPGSGGSPMRRETSAGFQNGLNYIAIDVREEPGLPPQPQPPPPPLPQPGDKSSWGRTRSLGGLISAVGVGSTGGGCGGPGPGALPPANTYASIDFLSHHLKEATIVKE

SEQ ID NO: 1071 - protein, 532 aa, Homo sapiens
  misc_feature (1)...(532): Xaa = any amino acid or nothing
TVPVPARRRPSTNCTVLRLRRDRQRAQSTLARRNRADCSWKMAASVVCRAATAGAQVLLRARRSPALLRTPALRSTATFAQALQFVPETQVSLLDNGLRVASEQSSQPTCTVGVWIDVGSRFETEKNNGAGYFLEHLAFKGTKNRPGSALEKEVESMGAHLNAYSTREHTAYYIKALSKDLPKAVELLGDIVQNCSLEDSQIEKERDVILREMQENDASMRDVVFNYLHATAFQGTPLAQAVEGPSENVRKLSRADLTEYLSTHYKAPRMVLAAAGGVEAPRQLVRPRPRKHLGGIPWGHIAEDAGAPLFTPCRFTGQXRSGHRDDALPFAHVGHLQXKGPGWASPDNVALAKLANAIIGHYDCTYGGWPLHLSSPLASRWLWANKLCQKFSRPSGICYAETGLWLGAHFVCDRMKIDDMMFVLQGQWMRLCTSATESEVARGKNILRNALVSHLDGTTPVCEDIGRSLLTYGRRIPLAEWESRIAEVDASVVREICSKYIYDQCPAVAGYGPIEQLPDYNRIRSGMFWLRF

SEQ ID NO: 1072 - protein, 374 aa, Homo sapiens
APVPVPVVSCGRGLSAMGAVWSALLVGGGLAGALFVWLLRGGPGDTGKDGDAEQEKDAPLGGAAIPGGHQSGSSGLSPGPSGQELVTKPEHLQESNGHLISKTKDLGKLQAASWRLQNPSREVCDNSREHVPSGQFPDTEAPATSETSNSRSYSEVSRNESLESPMGEWGFQKGQEISAKAATCFAEKLPSSNLLKNRAKEEMSLSDLNSQDRVDHEEWEMVPRHSSWGDVGVGGSLKAPVLNLNQGMDNGRSTLVEARGQQVHGKMERVAVMPAGSQQVSVRFQVHYVTSTDVQFIAVTGDHECLGRWNTYIPLHYNKDGFWSHSIFLPADTVVEWKFVLVENGGVTRWEECSNRFLETGHEDKVVHAWWGIH

SEQ ID NO: 1073 - protein, 242 aa, Homo sapiens
SPSGLQLPQYSAAELQSPAAPGLRHVDSAGWGRRRAGPAGSSGYRAGYSSSTPHDANMAAQKDQQKDAEAEGLSGTTLLPKLIPSGAGREWLERRRATIRPWSTFVDQQRFSRPRNLGELCQRLVRNVEYYQSNYVFVFLGLILYCVVTSPMLLVALAVFFGACYILYLRTLESKLVLFGREVSPAHQYALAGGISFPFFWLAGAGSAVFWVLGATLVVIGSHAAFHQIEAVDGEELQMEPV

SEQ ID NO: 1074 - protein, 175 aa, Homo sapiens
VTRKSRDCEGERSKPRRRWKGWRTHLNMWNPNAGQPGPNPYPPNIGCPGGSNPAHPPPINPPFPPGPCPPPPGAPHGNPAFPPGGPPHPVPQPGYPGCQPLGPYPPPYPPPAPGIPPVNPLAPGMVGPAVIVDKKMQKKMKKAHKKMHKHQKHHKYHKHGKHSSSSSSSSSSDSD

SEQ ID NO: 1075 - protein, 449 aa, Homo sapiens
PWTLGGPELDAMGGCAGSRRRFSDSEGEETVPEPRLPLLDHQGAHWKNAVGFWLLGLCNNFSYVVMLSAAHDILSHKRTSGNQSHVDPGPTPIPHNSSSRFDCNSVSTAAVLLADILPTLVIKLLAPLGLHLLPYSPRVLVSGICAAGSFVLVAFSHSVGTSLCGVVFASISSGLGEVTFLSLTAFYPRAVISWWSSGTGGAGLLGALSYLGLTQAGLSPQQTLLSMLGIPALLLASYFLLLTSPEAQDPGGEEEAESAARQPLIRTEAPESKPGSSSSLSLRERWTVFKGLLWYIVPLVVVYFAEYFINQGLFELLFFWNTSLSHAQQYRWYQMLYQAGVFASRSSLRCCRIRFTWALALLQCLNLVFLLADVWFGFLPSIYLVFLIILYEGLLGGAAYVNTFHNIALETSDEHREFAMAATCISDTLGISLSGLLALPLHDFLCQLS

SEQ ID NO: 1076 - protein, 3717 aa, Homo sapiens
DPPGSRRARCPWSSGTRPGAGKMAKRLCAGSALCVRGPRGPAPLLLVGLALLGAARAREEAGGGFSLHPPYFNLAEGARIAASATCGEEAPARGSPRPTEDLYCKLVGGPVAGGDPNQTIRGQYCDICTAANSNKAHPASNAIDGTERWWQSPPLSRGLEYNEVNVTLDLGQVFHVAYVLIKFANSPRPDLWVLERSMDFGRTYQPWQFFASSKRDCLERFGPQTLERITRDDAAICTTEYSRIVPLENGEIVVSLVNGRPGAMNFSYSPLLREFTKATNVRLRFLRTNTLLGHLMGKALRDPTVTRRYYYSIKDISIGGRCVCHGHADACDAKDPTDPFRLQCTCQHNTCGGTCDRCCPGFNQQPWKPATANSANECQSCNCYGHATDCYYDPEVDRRRASQSLDGTYQGGGVCIDCQHHTTGVNCERCLPGFYRSPNHPLDSPHVCRRCNCESDFTDGTCEDLTGRCYCRPNFSGERCDVCAEGFTGFPSCYPTPSSSNDTREQVLPAGQIVNCDCSAAGTQGNACRKDPRVGRCLCKPNFQGTHCELCAPGFYGPGCQPCQCSSPGVADDRCDPDTGQCRCRVGFEGATCDRCAPGYFHFPLCQLCGCSPAGTLPEGCDEAGRCLCQPEFAGPHCDRCRPGYHGFPNCQACTCDPRGALDQLCGAGGLCRCRPGYTGTACQECSPGFHGFPSCVPCHCSAEGSLHAACDPRSGQCSCRPRVTGLRCDTCVPGAYNFPYCEAGSCHPAGLAPVDPALPEAQVPCMCRAHVEGPSCDRCKPGFWGLSPSNPEGCTRCSCDLRGTLGGVAECQPGTGQCFCKPHVCGQACASCKDGFFGLDQADYFGCRSCRCDIGGALGQSCEPRTGVCRCRPNTQGPTCSEPARDHYLPDLHHLRLELEEAATPEGHAVRFGFNPLEFENFSWRGYAQMAPVQPRIVARLNLTSPDLFWLVFRYVNRGAMSVSGRVSVREEGRSATCANCTAQSQPVAFPPSTEPAFITVPQRGFGEPFVLNPGTWALRVEAEGVLLDYVVLLPSAYYEAALLQLRVTEACTYRPSAQQSGDNCLLYTHLPLDGFPSAAGLEALCRQDNSLPRPCPTEQLSPSHPPLITCTGSDVDVQLQVAVPQPGRYALVVEYANEDARQEVGVAVHTPQRAPQQGLLSLHPCLYSTLCRGTARDTQDHLAVFHLDSEASVRLTAEQARFFLHGVTLVPIEEFSPEFVEPRVSCISSHGAFGPNSAACLPSRFPKPPQPIILRDCQVIPLPPGLPLTHAQDLTPAMSPAGPRPRPPTAVDPDAEPTLLREPQATVVFTTHVPTLGRYAFLLHGYQPAHPTFPVEVLINAGRVWQGHANASFCPHGYGCRTLVVCEGQALLDVTHSELTVTVRVPKGRWLWLDYVLVVPENVYSFGYLREEPLDKSYDFISHCAAQGYHISPSSSSLFCRNAAASLSLFYNNGARPCGCHEVGATGPTCEPFGGQCPCHAHVIGRDCSRCATGYWGFPNCRPCDCGARLCDELTGQCICPPRTIPPDCLLCQPQTFGCHPLVGCEECNCSGPGIQELTDPTCDTDSGQCKCRPNVTGRRCDTCSPGFHGYPRCRPCDCHEAGTAPGVCDPLTGQCYCKENVQGPKCDQCSLGTFSLDAANPKGCTRCFCFGATERCRSSSYTRQEFVDMEGWVLLSTDRQVVPHERQPGTEMLRADLRHVPEAVPEAFPELYWQAPPSYLGDRVSSYGGTLRYELHSETQRGDVFVPMESRPDVVLQGNQMSITFLEPAYPTPGHVHRGQLQLVEGNFRHTETRNTVSREELMMVLASLEQLQIRALFSQISSAVFLRRVALEVASPAGQGALASNVELCLCPASYRGDSCQECAPGFYRDVKGLFLGRCVPCQCHGHSDRCLPGSGVCVDCQHNTEGAHCERCQAGFVSSRDDPSAPCVSCPCPLSVPSNNFAEGCVLRGGRTQCLCKPGYAGASCERCAPGFFGNPLVLGSSCQPCDCSGNGDPNLLFSDCDPLTGACRGCLRHTTGPRCEICAPGFYGNALLPGNCTRCDCTPCGTEACDPHSGHCLCKAGVTGRRCDRCQEGHFGFNGCGGCRPCACGPAAEGSECHPQSGQCHCRPGTMGPQCRECAPGYWGLPEQGCRRCQCPGGRCDPHTGRCNCPPGLSGERCDTCSQQHQVPVPGGPVGHSIHCEVCDHCVVLLLDDLERAGALLPAIHEQLRGINASSMAWARLHRLNASIADLQSQLRSPLGPRHETAQQLEVLEQQSTSLGQDARRLGGQAVGTRDQASQLLAGTEATLGHAKTLLAAIRAVDRTLSELMSQTGHLGLANASAPSGEQLLRTLAEVERLLWEMRARDLGAPQAAAEAELAAAQRLLARVQEQLSSLWEENQALATQTRDRLAQHEAGLMDLREALNRAVDATREAQELNSRNQERLEEALQRKQELSRDNATLQATLHAARDTLASVFRLLHSLDQAKEELERLAASLDGARTPLLQRMQTFSPAGSKLRLVEAAEAHAQQLGQLALNLSSIILDVNQDRLTQRAIEASNAYSRILQAVQAAEDAAGQALQQADHTWATVVRQGLVDRAQQLLANSTALEEAMLQEQQRLGLVWAALQGARTQLRDVRAKKDQLEAHIQAAQAMLAMDTDETSKKIAHAKAVAAEAQDTATRVQSQLQAMQENVERWQGQYEGLRGQDLGQAVLDAGHSVSTLEKTLPQLLAKLSILENRGVHNASLALSASIGRVRELIAQARGAASKVKVPMKFNGRSGVQLRTPRDLADLAAYTALKFYLQGPEPEPGQGTEDRFVMYMGSRQATGDYMGVSLRDKKVHWVYQLGEAGPAVLSIDEDIGEQFAAVSLDRTLQFGHMSVTVERQMIQETKGDTVAPGAEGLLNLRPDDFVFYVGGYPSTFTPPPLLRFPGYRGCIEMDTLNEEVVSLYNFERTFQLDTAVDRPCARSKSTGDPWLTDGSYLDGTGFARISFDSQISTTKRFEQELRLVSYSGVLFFLKQQSQFLCLAVQEGSLVLLYDFGAGLKKAVPLQPPPPLTSASKAIQVFLLGGSRKRVLVRVERATVYSVEQDNDLELADAYYLGGVPPDQLPPSLRWLFPTGGSVRGCVKGIKALGKYVDLKRLNTTGVSAGCTADLLVGRAMTFHGHGFLRLALSNVAPLTGNVYSGFGFHSAQDSALLYYRASPDGLCQVSLQQGRVSLQLLRTEVKTQAGFADGAPHYVAFYSNATGVWLYVDDQLQQMKPHRGPPPELQPQPEGPPRLLLGGLPESGTIYNFSGCISNVFVQRLLGPQRVFDLQQNLGSVNVSTGCAPALQAQTPGLGPRGLQATARKASRRSRQPARHPACMLPPHLRTTRDSYQFGGSLSSHLEFVGILARHRNWPSLSMHVLPRSSRGLLLFTARLRPGSPSLALFLSNGHFVAQMEGLGTRLRAQSRQRSRPGRWHKVSVRWEKNRILLVTDGARAWSQEGPHRQHQGAEHPQPHTLFVGGLPASSHSSKLPVTVGFSGCVKRLRLHGRPLGAPTRMAGVTPCILGPLEAGLFFPGSGGVITLDLPGATLPDVGLELEVRPLAVTGLIFHLGQARTPPYLQLQVTEKQVLLRADDGAGEFSTSVTRPSVLCDGQWHRLAVMKSGNVLRLEVDAQSNHTVGPLLAAAAGAPAPLYLGGLPEPMAVQPWPPAYCGCMRRLAVNRSPVAMTRSVEVHGAVGASGCPAA

SEQ ID NO: 1077 - protein, 143 aa, Homo sapiens
ARVVAAEMGKFMKPGKVVLVLAGRYSGRKAVIVKNIDDGTSDRPYSHALVAGIDRYPRKVTAAMGKKKIAKRSKIKSFVKVYNYNHLMPTRYSVDIPLDKTVVNKDVFRDPALKRKARREAKVKFEERYKTGKNKWFFQKLRF

SEQ ID NO: 1078 - protein, 242 aa, Homo sapiens
SARLPGSGCCRPPVSARVAPGHQGAVGGSGRRPARVEVVDAAARPSSRPFSLPAAIMLALISRLLDWFRSLFWKEEMELTLVGLQYSGKTTFVNVIASGQFSEDMIPTVGFNMRKVTKGNVTIKIWDIGGQPRFRSMWERYCRGVNAIVYMIDAADREKIEASRNELHNLLDKPQLQGIPVLVLGNKRDLPNALDEKQLIEKMNLSAIQDREICCYSISCKEKDNIDITLQWLIQHSKSRRS

SEQ ID NO: 1079 - protein, 1062 aa, Homo sapiens
DYIEKHCPSAVVPVELQKLARGSLVGGGRQRPPQTPLRLLVDADNCLHRLYGGFYTDWVSGGQWNHMLGYLAALAKACFGGNIELFVFFNGALEKARLHEWVKRQGNERQTAQQIVSHVQNKGTPPPKVWFLPPVCMAHCIRLALIRFHVKVAQSIEDHHQEVIGFCRENGFHGLVAYDSDYALCNIPYYFSAHALKLSRNGKSLTTSQYLMHEVAKQLDLNPNRFPIFAALLGNHILPDEDLASFHWSLLGPEHPLASLKVRAHQLVLPPCDVVIKAVADYVRNIQDTSDLDAIAKDVFQHSQSRTDDKVIRFKRAIGYYSATSKPMSFHPPHYLAARPGPFGMPGMVPPHVPPQMLNIPQTSLQAKPVAPQVPSPGGAPGQGPYPYSLSEPAPLTLDTSGKNLTEQNSYSNIPHEGKHTPLYERSSPINPAQSGSPNHVDSAYFPGSSTSSSSDNDEGSGGATNHISGNKIGWEKTGSHSEPQARGDPGDQTKAEGSSTASSGSQLAEGKGSQMGTVQPIPCLLSMPTRNHMDITTPPLPPVAPEVLRVAEHRHKKGLMYPYIFHVLTKGEIKIAVSIEDEANKDLPPAALLYRPVRQYVYGVLFSLAESRKKTERLAFRKNRLPPEFSPVIIKEWAAYKGKSPQTPELVEALAFREWTCPNLKRLWLGKAVEDKNRRMRAFLACMRSDTPAMLNPANVPTHLMVLCCVLRYMVQWPGARILRRQELDAFLAQALSPKLYEPDQLQELKIENLDPRGIQLSALFMSGVDMALFANDACGQPIPWEHCCPWMYFDGKLFQSKLLKASREKTPLIDLCDGQADQAAKVEKMRQSVLEGLSFSRQSHTLPFPPPPALPFYPASAYPRHFGPVPPSQGRGRGFAGVCGFGGPYGETVATGPYRAFRVAAASGHCGAFSGSDSSRTSKSQGGVQPIPSQGGKLEIAGTVVGHWAGSRRGRGGRGPFPLQVVSVGGPARGRPRGVISTPVIRTFGRGGRYYGRGYKNQAAIQGRPPYAASAEEVAKELKSKSGESKSSAMSSDGSLAENGVIGRGEAGSPDEREHG

SEQ ID NO: 1080 - protein, 281 aa, Homo sapiens
KSTRSVFARRRRTACWGWALPRGSGEEAVAVSGPGPVGVAVAIMADPDPRYPRSSIEDDFNYGSSVASATVHIRMAFLRKVYSILSLQVLLTTVTSTVFLYFESVRTFVHESPALILLFALGSLGLIFALILNRHKYPLNLYLLFGFTLLEALTVAVVVTFYDVYIILQAFILTTTVFFGLTVYTLQSKKDFSKFGAGLFALLWILCLSGFLKFFFYSEIMELVLAAAGALLFCGFIIYDTHSLMHKLSPEEYVLAAISLYLDIINLFLHLLRFLEAVNKK

SEQ ID NO: 1081 - protein, 347 aa, Homo sapiens
APVREAARARGRRAGWGSAAQCQRQRQTRAPRSPARRLPWDSRARTPALPVRCPSMELLCCEGTRHAPRAGPDPRLLGDQRVLQSLLRLEERYVPRASYFQCVQREIKPHMRKMLAYWMLEVCEEQRCEEEVFPLAMNYLDRYLSCVPTRKAQLQLLGAVCMLLASKLRETTPLTIEKLCIYTDHAVSPRQLRDWEVLVLGKLKWDLAAVIAHDFLAFILHRLSLPRDRQALVKKHAQTFLALCATDYTFAMYPPSMIATGSIGAAVQGLGACSMSGDELTELLAGITGTEVDCLRACQEQIEAALRESLREASQTSSSPAPKAPRGSSSQGPSQTSTPTDVTAIHL

SEQ ID NO: 1082 - protein, 868 aa, Homo sapiens
HSAAPIDVLLPGGRALLPAAGRAGRGRCAAVADAVAVWGAPGGDGGSRRRFRSCISRRRRLMAATELRGVVGPGPAAIAALGGGGAGPPVVGGGGGRGDAGPGSGAASGTVVAAAAGGPGPGAGGVAAAGPAPAPPTGGSGGSGAGGSGSAREGWLFKWTNYIKGYQRRWFVLSNGLLSYYRSKAEMRHTCRGTINLATANITVEDSCNFIISNGGAQTYHLKASSEVERQRWVTALELAKAKAVKMLAESDESGDEESVSQTDKTELQNTLRTLSSKVEDLSTCNDLIAKHGTALQRSLSELESLKLPAESNEKIKQVNERATLFRITSNAMINACRDFLMLAQTHSKKWQKSLQYERDQRIRLEETLEQLAKQHNHLERAFRGATVLPANTPGNVGSGKDQCCSGKGDMSDEDDENEFFDAPEIITMPENLGHKRTGSNISGASSDISLDEQYKHQLEETKKEKRTRIPYKPNYSLNLWSIMKNCIGKELSKIPMPVNFNEPLSMLQRLTEDLEYHELLDRAAKCENSLEQLCYVAAFTVSSYSTTVFRTSKPFNPLLGETFELDRLEENGYRSLCEQVSHHPPAAAHHAESKNGWTLRQEIKITSKFRGKYLSIMPLGTIHCIFHATGHHYTWKKVTTTVHNIIVGKLWIDQSGEIDIVNHKTGDKCNLKFVPYSYFSRDVARKVTGEVTDPSGKVHFALLGTWDEKMECFKVQPVIGENGGDARQRGHEAEESRVMLWKRNPLPKNAENMYYFSELALTLNAWESGTAPTDSRLRPDQRLMENGRWDEANAEKQRLEEKQRLSRKKREAEAMKATEDGTPYDPYKALWFERKKDPVTKELTHIYRGEYWECKEKQDWSSCPDIF

SEQ ID NO: 1083 - protein, 1150 aa, Homo sapiens
  misc_feature (1)...(1150): Xaa = any amino acid or nothing
VGKQFLVDSRAACSVLTQPICLLSNCNCRVMGIDRCPKVRKFTFPLACEAMSRLFSPHFLCPPECPTPLLGRDLLSKMGATISLEEDRLQVEAEPEQGIHLLALLNGQELETQNIPKESKDHITPSLSDTSVLGQANKVPPVKTDLKPGMGYPWRKSYLLKPVALNGVQPLLHKFLXQGLRPCQSPGNTSVLPVKKPNGEYQFVXDLKGVNEAVIPIHPTPGPKLVCAQIPGDAQFFTLLHFKDAFFCVALSTQNPCIFCFEWRNPDTQKATXYTWTVLPQGFWEGPHLFGNAGSXAYRMGLLLQYVDDLFIVSQTWQDSDFNIIKTLNFLAERXYKAAPSKAQISLQKFRYLGFILTPGARTLVDGLEKAITSLLVPQTKRQPQGFLGMVGFCSIWIPNYGLTAKPLCETQKGEEREPLYWEKKCQLSFEPLKTELGQALVLGLPDEKPLTLYVRERLGIALGVLTQRLGPVQKPVAHFSKQTNPVAQKRPGCWRAVAATALLFSEASKLTQGQYTEAMTPHQVQTGLEVKGHHWLTAGRLTNYQALLLDTLDITLRVCQTLNTATSLPTTDDEDSQHQCTGPTKQTHSRPSLXDKPLENAKTEXYPDGSSFVEGTQKAGHAVVSLKETTETKALPPQTSAQKAALEALTEPHNWEKGRRVNLYTNSKYRFLLLCAHAAIWKEKGMLTDKNSPGKRKDPIQLLLEAAQLPCQVAVIHCKGHQRDWSLISQGNRATKQATWLXESSNVLALMTDPTNLPNHLQYSQQEQEXAKGQGYQENSAGWFTDGESFIPGTDQLKVTKHLHDATHXWRDVLWNSVHKIFTRKKLRKSVKQVTFVSELCSRNNPHTHPIPPSXLKLVQHRGTYLGEDWQVVLTQMTPNLGYKYLLVFVDTFTGRVKGFPTCTEKAVEVCKPSLKEVISQFGLPKSPQSGNRLSFMGKITQSLSTTLGIDYELAPQSSGKVKMNHTLETTLAKLFQEMHESWVKMLLSLLRVRRAPSCSLRLSSSQMIYQRPFLTTDLLLGEELHKKLQYRFRTDSKGDFRIWKQNPASPHXGWENPFQVNPGDQVLLKAXRAGSPEDHPLLKWEGPCWVILTTPTAANSQGITSWVHLSRSEMLSPKCFQTRPDGPFYSXKPVEDLKFRRANSSSEK

SEQ ID NO: 1084 - protein, 144 aa, Homo sapiens
RRLRERDRVSGEGGRPRAGISEALRCIMKFQYKEDHPFEYRKKEGEKIRKKYPDRVPVIVEKAPKARVPDLDKRKYLVPSDLTVGQFYFLIRKRIHLRPEDALFFFVNNTIPPTSATMGQLYEDNHEEDYFLYVAYSDESVYGK

SEQ ID NO: 1085 - protein, 339 aa, Homo sapiens
HEAPAAMWSCSWFNGTGLVEELPACQDLQLGLSLLSLLGLVVGVPVGLCYNALLVLANLHSKASMTMPDVYFVNMAVAGLVLSALAPVHLLGPPSSRWALWSVGGEVHVALQIPFNVSSLVAMYSTALLSLDHYIERALPRTYMASVYNTRHVCGFVWGGALLTSFSSLLFYICSHVSTRALECAKMQNAEAADATLVFIGYVVPALATLYALVLLSRVRREDTPLDRDTGRLEPSAHRLLVATVCTQFGLWTPHYLILLGHTVIISRGKPVDAHYLGLLHFVKDFSKLLAFSSSFVTPLLYRYMNQSFPSKLQRLMKKLPCGDRHCSPDHMGVQQVLA

SEQ ID NO: 1086 - protein, 153 aa, Homo sapiens
GLAMSPFGSLFPYPYTYMAAAAAASSAAASSSVHRHPFLNLNTMRPRLRYSPYSIPVPVPDGSSLLTTALPSMAAAAGPLDGKVAALAASPASVAVDSGSELNSRSSTLSSSSMSLSPKLCAEKEAATSELQSIQRLVSGLEAKPDRSRSASP

SEQ ID NO: 1087 - protein, 101 aa, Homo sapiens
FFFLRRSLALLPRLECSSTISAHCTLRLSGSSNCLTSASRVAGITGAHYHTKLIFVFLVEMGFHHLGQAGLEFLTSVDPPTLASQSASIMGVNHHAQPKSF

SEQ ID NO: 1088 - protein, 131 aa, Homo sapiens
HEGAFVSGEFCGGKLLRWCLVTDFPPDSCTTCSYSRRSTPGCSPGGSRGLSEGEGSSVSLQRSRVLSAMKHVLNLYLLGVVLTLLSIFVRVMESLEGLLESPSPGTSWTTRSQLANTEPTKGLPDHPSRSM

SEQ ID NO: 1089 - protein, 449 aa, Homo sapiens
GTRETSCSSAAPFAAALARDPNPASPLPEHRPRLHRGPGPPARLAAAMADPKYADLPGIARNEPDVYETSDLPEDDQAEFDAEELTSTSVEHIIVNPNAAYDKFKDKRVGTKGLDFSDRIGKTKRTGYESGEYEMLGEGLGVKETPQQKYQRLLHEVQELTTEVEKIKTTVKESATEEKLTPVLLAKQLAALKQQLVASHLEKLLGPDAAINLTDPDGALAKRLLLQLEATKNSKGGSGGKTTGTPPDSSLVTYELHSRPEQDKFSQAAKVAELEKRLTELETAVRCDQDAQNPLSAGLQGACLMETVELLQAKVSALDLAVLDQVEARLQSVLGKVNEIAKHKASVEDADTQSKVHQLYETIQRWSPIASTLPELVQRLVTIKAAARAKAMQFGQLLTHLDTTQQMIANSLKDNTTLLTQVQTTMRENLATVEGNFASIDERMKKLGK

SEQ ID NO: 1090 - protein, 563 aa, Homo sapiens
FKALSQYIYTNTHLEREAAFEVAILLRRMEEGARHRNNTEKKHPGGGESDASPEAGSGGGGVALKKEIGLVSACGIIVGNIIGSGIFVSPKGVLENAGSVGLALIVWIVTGFITVVGALCYAELGVTIPKSGGDYSYVKDIFGGLAGFLRLWIAVLVIYPTNQAVIALTFSNYVLQPLFPTCFPPESGLRLLAAICLLLLTWVNCSSVRWATRVQDIFTAGKLLALALIIIMGIVQICKGEYFWLEPKNAFENFQEPDIGLVALAFLQGSFAYGGWNFLNYVTEELVDPYKNLPRAIFISIPLVTFVYVFANVAYVTAMSPQELLASNAVAVTFGEKLLGVMAWIMPISVALSTFGGVNGSLFTSSRLFFAGAREGHLPSVLAMIHVKRCTPIPALLFTCISTLLMLVTSDMYTLINYVGFINYLFYGVTVAGQIVLRWKKPDIPRPIKINLLFPIIYLLFWAFLLVFSLWSEPVVCGIGLAIMLTGVPVYFLGVYWQHKPKCFSDFIELLTLVSQKMCVVVYPEVERGSGTEEANEDMEEQQQPMYQPTPTKDKDVAGQPQP

SEQ ID NO: 1091 - protein, 85 aa, Homo sapiens
ARESLGSVTQAGVQGHDLGSLQSPPPRFKRFSRLSLQSSWELLHVPQCPANFLWYFSSDGVSPCSPGWSQTPELRQSTHLSLPKG

SEQ ID NO: 1092 - protein, 322 aa, Homo sapiens
CSCFGLLSSWDYRDYVTGGACPSKATIPGKTVIVTGANTGIGKQTALELARRGGNIILACRDMEKCEAAAKDIRGETLNHHVNARHLDLASLKSIREFAAKIIEEEERVDILINNAGVMRCPHWTTEDGFEMQFGVNHLGHFLLTNLLLDKLKASAPSRIINLSSLAHVAGHIDFDDLNWQTRKYNTKAAYCQSKLAIVLFTKELSRRLQGSGVTVNALHPGVARTELGRHTGIHGSTFSSTTLGPIFWLLVKSPELAAQPSTYLAVAEELADVSGKYFDGLKQKAPAPEAEDEEVARRLWAESARLVGLEAPSVREQPLPR

SEQ ID NO: 1093 - protein, 509 aa, Homo sapiens
PPPSQALPQQLQQMHHTQHHQPPPQPQQPPVAQNQPSQLPPRSQTQPLVSQAQALPGQMLYTQPPLKFVRAPMVVQQPPVQPQVQQQQTAVQTAQAAQMVAPGVQMITEALAQGGMHIRARFPPTTAVSAIPSSSIPLGRQPMAQVSQSSLPMLSSPSPGQQVQTPQSMPPPPQPSPQPGQPSSQPNSNVSSGPAPSPSSFLPSPSPQPSQSPVTARTPQNFSVPSPGPLNTPVNPSSVMSPAGSSQAEEQQYLDKLKQLSKYIEPLRRMINKIDKNEDRKKDLSKMKSLLDILTDPSKRCPLKTLQKCEIALEKLKNDMAVPTPPPPPVPPTKQQYLCQPLLDAVLANIRSPVFNHSLYRTFVPAMTAIHGPPITAPVVCTRKRRLEDDERQSIPSVLQGEVARLDPKFLVNLDPSHCSNNGTVHLICKLDDKDLPSVPPLELSVPADYPAQSPLWIDRQWQYDANPFLQSVHRCMTSRLLQLPDKHSVTALLNTWAQSVHQACLSAA

SEQ ID NO: 1094 - protein, 463 aa, Homo sapiens
KSSSEACKDSRIGGMMKTLLLFVGLLLTWESGQVLGDQTVSDNELQEMSNQGSKYVNKEIQNAVNGVKQIKTLIEKTNEERKTLLSNLEEAKKKKEDALNETRESETKLKELPGVCNETMMALWEECKPCLKQTCMKFYARVCRSGSGLVGRQLEEFLNQSSPFYFWMNGDRIDSLLENDRQQTHMLDVMQDHFSRASSIIDELFQDRFFTREPQDTYHYLPFSLPHRRPHFFFPKSRIVRSLMPFSPYEPLNFHAMFQPFLEMIHEAQQAMDIHFHSPAFQHPPTEFIREGDDDRTVCREIRHNSTGCLRMKDQCDKCREILSVDCSTNNPSQAKLRRELDESLQVAERLTRKYNELLKSYQWKMLNTSSLLEQLNEQFNWVSRLANLTQGEDQYYLRVTTVASHTSDSDVPSGVTEVVVKLFDSDPITVTVPVEVSRKNPKFMETVAEKALQEYRKKHREE

SEQ ID NO: 1095 - protein, 231 aa, Homo sapiens
AAAGTLPGDTAMAGLSRGSARALLAALLASTLLALLVSPARGRGGRDHGDWDEASRLPPLPPREDAARVARFVTHVSDWGALATISTLEAVRGRPFADVLSLSDGPPGAGSGVPYFYLSPLQLSVSNLQENPYATLTMTLAQTNFCKKHGFDPQSPLCVHIMLSGTVTKVNETEMDIAKHSLFIRHPEMKTWPSSHNWFFAKLNITNIWVLDYFGGPKIVTPEEYYNVTVQ

SEQ ID NO: 1096 - protein, 1467 aa, Homo sapiens
GLDMFSFVDLRLLLLLAATALLTHGQEEGQVEGQDEDIPPITCVQNGLRYHDRDVWKPEPCRICVCDNGKVLCDDVICDETKNCPGAEVPEGECCPVCPDGSESPTDQETTGVEGPKGDTGPRGPRGPAGPPGRDGIPGQPGLPGPPGPPGPPGPPGLGGNFAPQLSYGYDEKSTGGISVPGPMGPSGPRGLPGPPGAPGPQGFQGPPGEPGEPGASGPMGPRGPPGPPGKNGDDGEAGKPGRPGERGPPGPQGARGLPGTAGLPGMKGHRGFSGLDGAKGDAGPAGPKGEPGSPGENGAPGQMGPRGLPGERGRPGAPGPAGARGNDGATGAAGPPGPTGPAGPPGFPGAVGAKGEAGPQGPRGSEGPQGVRGEPGPPGPAGAAGPAGNPGADGQPGAKGANGAPGIAGAPGFPGARGPSGPQGPGGPPGPKGNSGEPGAPGSKGDTGAKGEPGPVGVQGPPGPAGEEGKRGARGEPGPTGLPGPPGERGGPGSRGFPGADGVAGPKGPAGERGSPGPAGPKGSPGEAGRPGEAGLPGAKGLTGSPGSPGPDGKTGPPGPAGQDGRPGPPGPPGARGQAGVMGFPGPKGAAGEPGKAGERGVPGPPGAVGPAGKDGEAGAQGPPGPAGPAGERGEQGPAGSPGFQGLPGPAGPPGEAGKPGEQGVPGDLGAPGPSGARGERGFPGERGVQGPPGPAGPRGANGAPGNDGAKGDAGAPGAPGSQGAPGLQGMPGERGAAGLPGPKGDRGDAGPKGADGSPGKDGVRGLTGPIGPPGPAGAPGDKGESGPSGPAGPTGARGAPGDRGEPGPPGPAGFAGPPGADGQPGAKGEPGDAGAKGDAGPPGPAGPAGPPGPIGNVGAPGAKGARGSAGPPGATGFPGAAGRVGPPGPSGNAGPPGPPGPAGKEGGKGPRGETGPAGRPGEVGPPGPPGPAGEKGSPGADGPAGAPGTPGPQGIAGQRGVVGLPGQRGERGFPGLPGPSGEPGKQGPSGASGERGPPGPMGPPGLAGPPGESGREGAPAAEGSPGRDGSPGAKGDRGETGPAGPPGAPGAPGAPGPVGPAGKSGDRGETGPAGPAGPVGPVGARGPAGPQGPRGDKGETGEQGDRGIKGHRGFSGLQGPPGPPGSPGEQGPSGASGPAGPRGPPGSAGAPGKDGLNGLPGPIGPPGPRGRTGDAGPVGPPGPPGPPGPPGPPSAGFDFSFLPQPPQEKAHDGGRYYRADDANVVRDRDLEVDTTLKSLSQQIENIRSPEGSRKNPARTCRDLKMCHSDWKSGEYWIDPNQGCNLDAIKVFCNMETGETCVYPTQPSVAQKNWYISKNPKDKRHVWFGESMTDGFQFEYGGQGSDPADVAIQLTFLRLMSTEASQNITYHCKNSVAYMDQQTGNLKKALLLQGSNEIEIRAEGNSRFTYSVTVDGCTSHTGAWGKTVIEYKTTKTSRLPIIDVAPLDVGAPDQEFGFDVGPVCFL

SEQ ID NO: 1097 - protein, 1094 aa, Homo sapiens
VLFTYHGNSGLLATKSDETGWTTFFDYDSEGRLTNVTFPTGVVTNLHGDMDKAITVDIESSSREEDVSITSNLSSIDSFYTMVQDQLRNSYQIGYDGSLRIIYASGLDSHYQTEPHVLAGTANPTVAKRNMTLPGENGQNLVEWRFRKEQAQGKVNVFGRKLRVNGRNLLSVDFDRTTKTEKIYDDHRKFLLRIAYDTSGHPTLWLPSSKLMAVNVTYSSTGQIASIQRGTTSEKVDYDGQGRIVSRVFADGKTWSYTYLEKSMVLLLHSQRQYIFEYDMWDRLSAITMPSVARHTMQTIRSIGYYRNIYNPPESNASIITDYNEEGLLLQTAFLGTSRRVLFKYRRQTRLSEILYDSTRVSFTYDETAGVLKTVNLQSDGFICTIRYRQIGPLIDRQIFRFSEDGMVNARFDYSYDNSFRVTSMQGVINETPLPIDLYQFDDISGKVEQFGKFGVIYYDINQIISTAVMTYTKHFDAHGRIKEIQYEIFRSLMYWITIQYDNMGRVTKREIKIGPFANTTKYAYEYDVDGQLQTVYLNEKIMWRYNYDLNGNLHLLNPSNSARLTPLRYDLRDRITRLGDVQYRLDEDGFLRQRGTEIFEYSSKGLLTRVYSKGSGWTVIYRYDGLGRRVSSKTSLGQHLQFFYADLTYPTRITHVYNHSSSEITSLYYDLQGHLFAMEISSGDEFYIASDNTGTPLAVFSSNGLMLKQIQYTAYGEIYFDSNIDFQLVIGFHGGLYDPLTKLIHFGERDYDILAGRWTTPDIEIWKRIGKDPAPFNLYMFRNNNPASKIHDVKDYITDVNSWLVTFGFHLHNAIPGFPVPKFDLTEPSYELVKSQQWDDIPPIFGVQQQVARQAKAFLSLGKMAEVQVSRRRAGGAQSWLWFATVKSLIGKGVMLAVSQGRVQTNVLNIANEDCIKVAAVLNNAFYLENLHFTIEGKDTHYFIKTTTPESDLGTLRLTSGRKALENGINVTVSQSTTVVNGRTRRFADVEMQFGALALHVRYGMTLDEEKARILEQARQRALARAWAREQQRVRDGEEGARLWTEGEKRQLLSAGKVQGYDGYYVLSVEQYPELADSANNIQFLRQSEIGRR

SEQ ID NO: 1098 - protein, 339 aa, Homo sapiens
DSVSPARSAGPMAAAAAAMAEQESARNGGRNRGGVQRVEGKLRASVEKGDYYEAHQMYRTLFFRYMSQSKHTEARELMYSGALLFFSHGQQNSAADLSMLVLESLEKAEVEVADELLENLAKVFSLMDPNSPERVTFVSRALKWSSGGSGKLGHPRLHQLLALTLWKEQNYCESRYHFLHSADGEGCANMLVEYSTSRGFRSEVDMFVAQAVLQFLCLKNKSSASVVFTTYTQKHPSIEDGPPFVEPLLNFIWFLLLAVDGGKLTVFTVLCEQYQPSLRRDPMYNEYLDRIGQLFFGVPPKQTSSYGGLLGNLLTSLMGSSEQEDGEESPSDGSPIELD

SEQ ID NO: 1099 - protein, 51 aa, Homo sapiens
VQYTEVQVSSAESHKDLGKKEKETVYSEVRKAVPDAVESRYSRTEGSLDGT

SEQ ID NO: 1100 - protein, 408 aa, Homo sapiens
RGGREGASRSRSELPTRVLPAEGWWWERSGSGGAEPGRGPCGGRAAAGPADGGMGCTVSAEDKAAAERSKMIDKNLREDGEKAAREVKLLLLGAGESGKSTIVKQMKIIHEDGYSEEECRQYRAVVYSNTIQSIMAIVKAMGNLQIDFADPSRADDARQLFALSCTAEEQGVLPDDLSGVIRRLWADHGVQACFGRSREYQLNDSAAYYLNDLERIAQSDYIPTQQDVLRTRVKTTGIVETHFTFKDLHFKMFDVGGQRSERKKWIHCFEGVTAIIFCVALSAYDLVLAEDEEMNRMHESMKLFDSICNNKWFTDTSIILFLNKKDLFEEKITHSPLTICFPEYTGANKYDEAASYIQSKFEDLNKRKDTKEIYTHFTCATDTKNVQFVFDAVTDVIIKNNLKDCGLF

SEQ ID NO: 1101 - protein, 612 aa, Homo sapiens
AGGNQRTQSPRKNFMAFQASHRPAWGKSRKKNWQYEGPTQKLFLKRNNVSAPDGPSDPSISASSEQSGAQQPPGLQVERIVDKRKNKKGKTEYLVRWKGYDSEDDTWEPEQHLVNCEEYIHDFNRRHTEKQKESTLTRTNRTSPNNARKQISRSTNSNFSKTSPKALVIGKDHESKNSQLFAASQKFRKNTAPSLSSRKNMDLAKSGIKILVPKSPVKSRTAVDGFQSESPEKLDPVEQGQEDTVAPEVAAEKPVGALLGPGAERARMGSRPRIHPLVPQVPGPVTAAMATGLAVNGKGTSPFMDALTANGTTNIQTSVTGVTASKRKFIDDRRDQPFDKRLRFSVRQTESAYRYRDIVVRKQDGFTHILLSTKSSENNSLNPEVMREVQSALSTAAADDSKLVLLSAVGSVFCCGLDFIYFIRRLTDDRKRESTKMAEAIRNFVNTFIQFKKPIIVAVNGPAIGLGASILPLCDVVWANEKAWFQTPYTTFGQSPDGCSTVMFPKIMGGASANEMLLSGRKLTAQEACGKGLVSQVFWPGTFTQEVMVRIKELASCNPVVLEESKALVRCNMKMELEQANERECEVLKKIWGSAQGMDSMLKYLQRKIDEF

SEQ ID NO: 1102 - protein, 1452 aa, Homo sapiens
MRGLGTCLATLAGLLLTAAGETFSGGCLFDEPYSTCGYSQSEGDDFNWEQVNTLTKPTSDPWMPSGSLMLVNASGRPEGQRAHLLLPQLKENDTHCIDFHYFVSSKSNSPPGLLNVYVKVNNGPLGNPIWNISGDPTRTWNRAELAISTFWPNFYQVIFEVITSGHQGYLAIDEVKVLGHPCTRTPHFLRIQNVEVNAGQFATFQCSAIGRTVAGDRLWLQGIDVRDAPLKEIKVTSSRRFIASFNVVNTTKRDAGKYRCMIRTEGGVGISNYAELVVKEPPVPIAPPQLASVGATYLWIQLNANSINGDGPIVAREVEYCTASGSWNDRQPVDSTSYKIGHLDPDTEYEISVLLTRPGEGGTGSPGPALRTRTKCADPMRGPRKLEVVEVKSRQITIRWEPFGYNVTRCHSYNLTVHYCYQVGGQEQVREEVSWDTENSHPQHTITNLSPYTNVSVKLILMNPEGRKESQELIVQTDEDLPGAVPTESIQGSTFEEKIFLQWREPTQTYGVITLYEITYKAVSSFDPEIDLSNQSGRVSKLGNETHFLFFGLYPGTTYSFTIRASTAKGFGPPATNQFTTKISAPSMPAYELETPLNQTDNTVTVMLKPAHSRGAPVSVYQIVVEEERPRRTKKTTEILKCYPVPIHFQNASLLNSQYYFAAEFPADSLQAAQPFTIGDNKTYNGYWNTPLLPYKSYRIYFQAASRANGETKIDCVQVATKGAATPKPVPEPEKQTDHTVKIAGVIAGILLFVIIFLGVVLVMKKRKLAKKRKETMSSTRQEMTVMVNSMDKSYAEQGTNCDEAFSFMDTHNLNGRSVSSPSSFTMKTNTLSTSVPNSYYPDETHTMASDTSSLVQSHTYKKREPADVPYQTGQLHPAIRVADLLQHITQMKCAEGYGFKEEYESFFEGQSAPWDSAKKDENRMKNRYGNIIAYDHSRVRLQTIEGDTNSDYINGNYIDGYHRPNHYIATQGPMQETIYDFWRMVWHENTASIIMVTNLVEVGRVKCCKYWPDDTEIYKDIKVTLIETELLAEYVIRTFAVEKRGVHEIREIRQFHFTGWPDHGVPYHATGLLGFVRQVKSKSPPSAGPLVVHCSAGAGRTGCFIVIDIMLDMAEREGVVDIYNCVRELRSRRVNMVQTEEQYVFIHDAILEACLCGDTSVPASQVRSLYYDMNKLDPQTNSSQIKEEFRTLNMVTPTLRVEDCSIALLPRNHEKNRCMDILPPDRCLPFLITIDGESSNYINAALMDSYKQPSAFIVTQHPLPNTVKDFWRLVLDYHCTSVVMLNDVDPAQLCPQYWPENGVHRHGPIQVEFVSADLEEDIISRIFRIYNAARPQDGYRMVQQFQFLGWPMYRDTPVSKRSFLKLIRQVDKWQEEYNGGEGRTVVHCLNGGGRSGTFCAISIVCEMLRHQRTVDVFHAVKTLRNNKPNMVDLLDQYKFCYEVALEYLNSG

SEQ ID NO: 1103 - protein, 91 aa, Homo sapiens
  misc_feature (1)...(91): Xaa = any amino acid or nothing
FFFLRRSLALSPRLECSGAISAHCNLRLLGSRDSPASASQVAGTTGTRHHTQLIFCIFSRGGVSPCXPGWSPSPDLVIRPPCPPKVLGLQA

SEQ ID NO: 1104 - protein, 345 aa, Homo sapiens
EEEWGPGGGWRKRPRAEEGAIEFQTQTTRRARTHRAGALPRSAPAPSVRRAGGDAVAAPELGPGATIEAGAARGPERSGAATAARANLGSRFPARRGARGARSPAMSRSNRQKEYKCGDLVFAKMKGYPHWPARIDEMPEAAVKSTANKYQVFFFGTHETAFLGPKDLFPYEESKEKFGKPNKRKGFSEGLWEIENNPTVKASGYQSSQKKSCVEEPEPEPEAAEGDGDKKGNAEGSSDEEGKLVIDEPAKEKNEKGALKRRAGDLLEDSPKRPKEAENPEGEEKEAATLEVERPLPMEVEKNSTPSEPGSGRGPPQEEEEEEDEEEEATKEDAEAPGIRDHESL

SEQ ID NO: 1105 - protein, 370 aa, Homo sapiens
SSKESGSSPVFSARRRRRLAMFGLKRNAVIGLNLYCGGAGLGAGSGGATRPGGRLLATEKEASARREIGGGEAGAVIGGSAGASPPSTLTPDSRRVARPPPIGAEVPDVTATPARLLFFAPTRRAAPLEEMEAPAADAIMSPEEELDGYEPEPLGKRPAVLPLLELVGESGNNTSTDGSLPSTPPPAEEEEDELYRQSLEIISRYLREQATGAKDTKPMGRSGATSRKALETLRRVGDGVQRNHETVFQGMLRKLDIKNEDDVKSLSRVMIHVFSDGVTNWGRIVTLISFGAFVAKHLKTINQESCIEPLAESITDVLVRTKRDWLVKQRGWDGFVEFFHVEDLEGGIRNVLLAFAGVAGVGAGLAYLIR

SEQ ID NO: 1106 - protein, 499 aa, Homo sapiens
ITAMGTQKVTPALIFAITVATIGSFQFGYNTGVINAPEKIIKEFINKTLTDKGNAPPSEVLLTSLWSLSVAIFSVGGMIGSFSVGLFVNRFGRRNSMLIVNLLAVTGGCFMGLCKVAKSVEMLILGRLVIGLFCGLCTGFVPMYIGEISPTALRGAFGTLNQLGIVVGILVAQIFGLEFILGSEELWPLLLGFTILPAILQSAALPFCPESPRFLLINRKEEENAKQILQRLWGTQDVSQDIQEMKDESARMSQEKQVTVLELFRVSSYRQPIIISIVLQLSQQLSGINAVFYYSTGIFKDAGVQEPIYATIGAGVVNTIFTVVSLFLVERAGRRTLHMIGLGGMAFCSTLMTVSLLLKDNYNGMSFVCIGAILVFVAFFEIGPGPIPWFIVAELFSQGPRPAAMAVAGCSNWTSNFLVGLLFPSAAHYLGAYVFIIFTGFLITFLAFTFFKVPETRGRTFEDITRAFEGQAHGADRSGKDGVMEMNSIEPAKETTTNV

SEQ ID NO: 1107 - protein, 644 aa, Homo sapiens
FNTMGPPLKLFKNQKYQELKQECIKDSRLFCDPTFLPENDSLFYNRLLPGKVVWKRPQDICDDPHLIVGNISNHQLTQGRLGHKPMVSAFSCLAVQESHWTKTIPNHKEQEWDPQKTEKYAGIFHFRFWHFGEWTEVVIDDLLPTINGDLVFSFSTSMNEFWNALLEKAYAKLLGCYEALDGLTITDIIVDFTGTLAETVDMQKGRYTELVEEKYKLFGELYKTFTKGGLICCSIESPNQEEQEVETDWGLLKGHTYTMTDIRKIRLGERLVEVFSAEKVYMVRLRNPLGRQEWSGPWSEISEEWQQLTASDRKNLGLVMSDDGEFWMSLEDFCRNFHKLNVCRNVNNPIFGRKELESVLGCWTVDDDPLMNRSGGCYNNRDTFLQNPQYIFTVPEDGHKVIMSLQQKDLRTYRRMGRPDNYIIGFELFKVEMNRKFRLHHLYIQERAGTSTYIDTRTVFLSKYLKKGNYVLVPTMFQHGRTSEFLLRIFSEVPVQLRELTLDMPKMSCWNLARGYPKVVTQITVHSAEDLEKKYANETVNPYLVIKCGKEEVRSPVQKNTVHAIFDTQAIFYRRTTDIPIIVQVWNSRKFCDQFLGQVTLDADPSDCRDLKSLYLRKKGGPTAKVKQGHISFKVISSDDLTEL

SEQ ID NO: 1108 - protein, 492 aa, Homo sapiens
KPLDFFSSPLSSTESELIGFHSLGRNKNYLGSFIERDSLTLRASGCSWVQREPPALTSVSSAPRPLASAWVRRGGIKPRSESGSFARGALGLCLPRGASGRHPALSRSSTPMIDTLRPVPFASEMAISKTVAWLNEQLELGNERLLLMDCRPQELYESSHIESAINVAIPGIMLRRLQKGNLPVRALFTRGEDRDRFTRRCGTDTVVLYDESSSDWNENTGGESLLGLLLKKLKDEGCRAFYLEGGFSKFQAEFSLHCETNLDGSCSSSSPPLPVLGLGGLRISSDSSSDIESDLDRDPNSATDSDGSPLSNSQPSFPVEILPFLYLGCAKDSTNLDVLEEFGIKYILNVTPNLPNLFENAGEFKYKQIPISDHWSQNLSQFFPEAISFIDEARGKNCGVLVHCLAGISRSVTVTVAYLMQKLNLSMNDAYDIVKMKKSNISPNFNFMGQLLDFERTLGLSSPCDNRVPAQQLYFTTPSNQNVYQVDSLQST

SEQ ID NO: 1109 - protein, 1207 aa, Homo sapiens
RSASFAPASGRRASRPDPPASPTPAVTRRLGAGARAAPRRAMDGRTPRPQDAPARRKPKAKAPLPPAETKYTDVSSAADSVESTAFIMEQKENMIDKDVELSVVLPGDIIKSTTVHGSKPMMDLLIFLCAQYHLNPSSYTIDLLSAEQNHIKFKPNTPIGMLEVEKVILKPKMLDKKKPTPIIPEKTVRVVINFKKTQKTIVRVSPHASLQELAPIICSKCEFDPLHTLLLKDYQSQEPLDLTKSLNDLGLRELYAMDVNRESCQISQNLDIMKEKENKGFFSFFQRSKKKRDQTASAPATPLVNKHRPTFTRSNTISKPYISNTLPSDAPKKRRAPLPPMPASQSVPQDLAHIQERPASCIVKSMSVDETDKSPCEAGRVRAGSLQLSSMSAGNSSLRRTKRKAPSPPSKIPPHQSDENSRVTALQPVDGVPPDSASEANSPEELSSPETFHPGLSSQEQCTAPKLMEETSVFECPGTPEAAITSLTSGISSDYSLEEIDEKEELSEVPKVEAENISPKSQDIPFVSTDIINTLKNDPDSALGNGSGEFSQNSMEEKQETKSTDGQEPHSVVYDTSNGKKVVDSIRNLKSLGPNQENVQNEIIVYPENTEDNMKNGVKKTEINVEGVAKNNNIDMEVERPSNSEAHETDTAISYKENHLAASSVPDQKLNQPSAEKTKDAAIQTTPSCNSFDGKHQDHNLSDSKVEECVQTSNNNISTQHSCLSSQDSVNTSREFRSQGTLIIHSEDPLTVKDPICAHGNDDLLPPVDRIDKNSTASYLKNYPLYRQDYNPKPKPSNEITREYIPKIGMTTYKIVPPKSLEISKDWQSETIEYKDDQDMHALGKKHTHENVKETAIQTEDSAISESPEEPLPNLKPKPNLRTEHQVPSSVSSPDDAMVSPLKPAPKMTRDTGTAPFAPNLEEINNILESKFKSRASNAQAKPSSFFLQMQKRVSGHYVTSAAAKSVHAAPNPAPKELTNKEAERDMLPSPEQTLSPLSKMPHSVPQPLVEKTDDDVIGQAPAEASPPPIAPKPVTIPASQVSTQNLKTLKTFGAPRPYSSSGPSPFALAVVKRSQSFSKERTESPSASALVQPPANTEEGKTHSVNKFVDIPQLGVSDKENNSAHNEQNSQIPTPTDGPSFTVMRQSSLTFQSSDPEQMRQSLLTAIRSGEAAAKLKRVTIPSNTISVNGRSRLSHSMSPDAQDGH

SEQ ID NO: 1110 - protein, 853 aa, Homo sapiens
TRASSTMSKSFQQSSLSRDSQGHGRDLSAAGIGLLAAATQSLSMPASLGRMNQGTARLASLMNLGMSSSLNQQGAHSALSSASTSSHNLQSIFNIGSRGPLPLSSQHRGDADQASNILASFGLSARDLDELSRYPEDKITPENLPQILLQLKRRRTEEGPTLSYGRDGRSATREPPYRVPRDDWEEKRHFRRDSFDDRGPSLNPVLDYDHGSRSQESGYYDRMDYEDDRLRDGERCRDDSFFGETSHNYHKFDSEYERMGRGPGPLQERSLFEKKRGAPPSSNIEDFHGLLPKGYPHLCSICDLPVHSNKEWSQHINGASHSRRCQLLLEIYPEWNPDNDTGHTMGDPFMLQQSTNPAPGILGPPPPSFHLGGPAVGPRGNLGAGNGNLQGPRHMQKGRVETSRVVHIMDFQRGKNLRYQLLQLVEPFGVISNHLILNKINEAFIEMATTEDAQAAVDYYTTTPALVFGKPVRVHLSQKYKRIKKPEGKPDQKFDQKQELGRVIHLSNLPHSGYSDSAVLKLAEPYGKIKNYILMRMKSQAFIEMETREDAMAMVDHCLKKALWFQGRCVKVDLSEKYKKLVLRIPNRGIDLLKKDKSRKRSYSPDGKESPSDKKSKTDGSQKTESSTEGKEQEEKSGEDGEKDTKDDQTEQEPNMLLESEDELLVDEEEAAALLESGSSVGDETDLANLGDVASDGKKEPSDKAVKKDGSASAAAKKKLKKVDKIEELDQENEAALENGIKNEENTEPGAESSENADDPNKDTSENADGQSDENKDDYTIPDEYRIGPYQPNVPVGIDYVIPKTGFYCKLCSLFYTNEEVAKNTHCSSLPHYQKLKKFLNKLAEERRQKKET

SEQ ID NO: 1111 - protein, 235 aa, Homo sapiens
GSQMHRRRSRSCREDQKPVMDDQRDLISNNEQLPMLGRRPGAPESKCSRGALYTGFSILVTLLLAGQATTAYFLYQQQGRLDKLTVTSQNLQLENLRMKLPKPPKPVSKMRMATPLLMQALPMGALPQGPMQNATKYGNMTEDHVMHLLQNADPLKVYPPLKGSFPENLRHLKNTMETIDWKVFESWMHHWLLFEMSRHSLEQKPTDAPPKESLELEDPSSGLGVTKQDLGPVPM

SEQ ID NO: 1112 - protein, 513 aa, Homo sapiens
AGEVQLHVWIRGMRIQPQKAAAIIDLDPDFEPQSRPRSCTWPLPRPEIANQPSEPPEVEPDLGEKVHTEGRSEPILLPSRLSEPAGGPQPGILGAVTGPRKGGSRRNAWGNQSYAEFISQAIESAPEKRLTLAQIYEWMVRTVPYFKDKGDSNSSAGWKNSIRHNLSLHSKFIKVHNEATGKSSWWMLNPEGGKSGKAPRRRAASMDSSSKLLRGRSKAPKKKPSVLPAPPEGATPTSPVGHFAKWSGSPCSRNREEADMWTTFRPRSSSNASSVSTRLSPLRPESEVLAEEIPASVSSYAGGVPPTLNEGLELLDGLNLTSSHSLLSRSGLSGFSLQHPGVTGPLHTYSSSLFSPAEGPLSAGEGCFSSSQALEALLTSDTPPPPADVLMTQVDPILSQAPTLLLLGGLPSSSKLATGVGLCPKPLEARGPSSLVPTLSMIAPPPVMASAPIPKALGTPVLTPPTEAASQDRMPQDLDLDMYMENLECDMDNIISDLMDEGEGLDFNFEPDP

SEQ ID NO: 1113 - protein, 406 aa, Homo sapiens
SYRGRRRAGLAFRGTGRGAGCVTQIPVGTVGGGTSRAGRVEYKSRRERPGRRRLQTIPDAGARAPTSPRASSARVRSAFLRPTMARGPGLAPPPLRLPLLLLVLAAVTGHTAAQDNCTCPTNKMTVCSPDGPGGRCQCRALGSGMAVDCSTLTSKCLLLKARMSAPKNARTLVRPSEHALVDNDGLYDPDCDPEGRFKARQCNQTSVCWCVNSVGVRRTDKGDLSLRCDELVRTHHILIDLRHRPTAGAFNHSDLDAELRRLFRERYRLHPKFVAAVHYEQPTIQIELRQNTSQKAAGDVDIGDAAYYFERDIKGESLFQGRGGLDLRVRGEPLQVERTLIYYLDEIPPKFSMKRLTAGLIAVIVVVVVALVAGMAVLVITNRRKSGKYKKVEIKELGELRKEPSL

SEQ ID NO: 1114 - protein, 182 aa, Homo sapiens
LGSSPGPPRQVCLVTAGGRCFFPELGTSLSAMRFLAATFLLLALSTAAQAEPVQFKDCGSVDGVIKEVNVSPCPTQPCQLSKGQSYSVNVTFTSNIQSKSSKAVVHGILMGVPVPFPIPEPDGCKSGINCPIQKDKTYSYLNKLPVKSEYPSIKLVVEWQLQDDKNQSLFCWEIPVQIVSHL

SEQ ID NO: 1115 - protein, 47 aa, Homo sapiens
SLLLLLLFGPCLLNLITQFVSSRLQAIKLQTNLSAGRHPRNIQESPF

SEQ ID NO: 1116 - protein, 225 aa, Homo sapiens
PVMAAGDGDVKLGTLGSGSESSNDGGSESPGDAGAAAEGGGWAAAALALLTGGGEMLLNVALVALVLLGAYRLWVRWGRRGLGAGAGAGEESPATSLPRMKKRDFSLEQLRQYDGSRNPRILLAVNGKVFDVTKGSKFYGPAGPYGIFAGRDASRGLATFCLDKDALRDEYDDLSDLNAVQMESVREWEMQFKEKYDYVGRLLKPGEEPSEYTDEEDTKDHNKQD

SEQ ID NO: 1117 - protein, 318 aa, Homo sapiens
LPPLRPRSPAGPPRLPAASGSGSSRTARPCRRVPSAARPRAARSPPAPSAPRPRPSPRAVMLPLCLVAALLLAAGPGPSLGDEAIHCPPCSEEKLARCRPPVGCEELVREPGCGCCATCALGLGMPCGVYTPRCGSGLRCYPPRGVEKPLHTLMHGQGVCMELAEIEAIQESLQPSDKDEGDHPNNSFSPCSAHDRRCLQKHFAKIRDRSTSGGKMKVNGAPREDARPVPQGSCQSELHRALERLAASQSRTHEDLYIIPIPNCDRNGNFHPKQCHPALDGQRGKCWCVDRKTGVKLPGGLEPKGELDCHQLADSFRE

SEQ ID NO: 1118 - protein, 208 aa, Homo sapiens
EVVSTAAPLSRIPSPTPRSKPAFRHAPPVFRARAEPRGCARLKPRPSSLGHALRDSSPVAQIPPAGPQNPMILQQPLQRGPQGGAQRLPRAALGVTWGLDASSPLRGAVPMSTKRRLEEEQEPLRKQFLSEENMATHFSQLSLHNDHPYCSPPMTFSPALPPLRSPCSELLLWRYPGSLIPEALRLLRLGDTPSPPYPATPAGDIMEL

SEQ ID NO: 1119 - protein, 497 aa, Homo sapiens
LRFTMLKALFLTMLTLALVKSQDTEETITYTQCTDGYEWDPVRQQCKDIDECDIVPDACKGGMKCVNHYGGYLCLPKTAQIIVNNEQPQQETQPAEGTSGATTGVVAASSMATSGVLPGGGFVASAAAVAGPEMQTGRNNFVIRRNPADPQRIPSNPSHRIQCAAGYEQSEHNVCQDIDECTAGTHNCRADQVCINLRGSFACQCPPGYQKRGEQCVDIDECTIPPYCHQRCVNTPGSFYCQCSPGFQLAANNYTCVDINECDASNQCAQQCYNILGSFICQCNQGYELSSDRLNCEDIDECRTSSYLCQYQCVNEPGKFSCMCPQGYQVVRSRTCQDINECETTNECREDEMCWNYHGGFRCYPRNPCQDPYILTPENRCVCPVSNAMCRELPQSIVYKYMSIRSDRSVPSDIFQIQATTIYANTINTFRIKSGNENGEFYLRQTSPVSAMLVLVKSLSGPREHIVDLEMLTVSSIGTFRTSSVLRLTIIVGPFSF

SEQ ID NO: 1120 - protein, 4384 aa, Homo sapiens
EDLFKCIMAHAASQLKKNRDLEINAEEEPEKKRKHRKRSRDRKKKSDANASYLRAARAGHLEKALDYIKNGVDINICNQNGLNALHLASKEGHVEVVSELLQREANVDAATKKGNTALHIASLAGQAEVVKVLVTNGANVNAQSQNGFTPLYMAAQENHLEVVKFLLDNGASQSLATEDGFTPLAVALQQGHDQVVSLLLENDTKGKVRLPALHIAARKDDTKAAALLLQNDNNADVESKSGFTPLHIAAHYGNINVATLLLNRAAAVDFTARNDITPLHVASKRGNANMVKLLLDRGAKIDAKTRDGLTPLHCGARSGHEQVVEMLLDRAAPILSKTKNGLSPLHMATQGDHLNCVQLLLQHNVPVDDVTNDYLTALHVAAHCGHYKVAKVLLDKKANPNAKALNGFTPLHIACKKNRIKVMELLLKHGASIQAVTESGLTPIHVAAFMGHVNIVSQLMHHGASPNTTNVRGETALHMAARSGQAEVVRYLVQDGAQVEAKAKDDQTPLHISARLGKADIVQQLLQQGASPNAATTSGYTPLHLSAREGHEDVAAFLLDHGASLSITTKKGFTPLHVAAKYGKLEVANLLLQKSASPDAAGKSGLTPLHVAAHYDNQKVALLLLDQGASPHAAAKNGYTPLHIAAKKNQMDIATTLLEYGADANAVTRQGIASVHLAAQEGHVDMVSLLLGRNANVNLSNKSGLTPLHLAAQEDRVNVAEVLVNQGAHVDAQTKMGYTPLHVGCHYGNIKIVNFLLQHSAKVNAKTKNGYTPLHQAAQQGHTHIINVLLQNNASPNELTVNGNTALGIARRLGYISVVDTLKIVTEETMTTTTVTEKHKMNVPETMNEVLDMSDDEVRKANAPEMLSDGEYISDVEEGEDAMTGDTDKYLGPQDLKELGDDSLPAEGYMGFSLGARSASLRSFSSDRSYTLNRSSYARDSMMIEELLVPSKEQHLTFTREFDSDSLRHYSWAADTLDNVNLVSSPIHSGFLVSFMVDARGGSMRGSRHHGMRIIIPPRKCTAPTRITCRLVKRHKLANPPPHGERRGISSRLVEMGPAGAQFLGPVIVEIPHFGSMRGKERELIVLRSENGETWKEHQFDSKNEDLTELLNGMDEELDSPEELGKKRICRIITKDFPQYFAVVSRIKQESNQIGPEGGILSSTTVPLVQASFPEGALTKRIRVGLQAQPVPDEIVKKILGNKATFSPIVTVEPRRRKFHKPITMTIPVPPPSGEGVSNGYKGDTTPNLRLLCSITGGTSPAQWEDITGTTPLTFIKDCVSFTTNVSARFWLADCHQVLETVGLATQLYRELICVPYMAKFVVFAKMNDPVESSLRCFCMTDDKVDKTLEQQENFEEVARSKDIEVLEGKPIYVDCYGNLAPLTKGGQQLVFNFYSFKENRLPFSIKIRDTSQEPCGRLSFLKEPKTTKGLPQTAVCNLNITLPAHKKETESDQDDEIEKTDRRQSFASLALRKRYSYLTEPGMIERSTGATRSLPTTYSYKPFFSTRPYQSWTTAPITVPGPAKSGFTSLSSSSSNTPSASPLKSIWSVSTPSPIKSTLGASTTSSVKSISDVASPIRSLRTMSSPIKTVVSQSPYNIQVSSGTLARAPAVTEATPLKGLASNSTFSSRTSPVTTAGSLLERSSITMTPPASPKSNINMYSSSLPFKSIITSAAPLISSPLKSVVSPVKSRVDVISSAKITMASSLSSPVKQMPGHAEVALVNGSISPLKYASSSTLINGCKATATLQEKISSATNSVSSVVSAATDTVEKVFSTTTAMPFSPLRSYVSAAPSAFQSLRTPSASALYTSLGSSISATTSSVTSSIITVPVYSVVNVLPEPALKKLPDSNSFTKSAAALLSPIKTLTTETHPQPHFSRTSSPVKSSLFLAPSALKLSTPSSLSSSQEILKDVAEMKEDLMRMTAILQTDVPEEKPFQPELPKEGRIDDEEPFKIVEKVKEDLVKVSEILKKDVCVDNKGSPKSPKSDKGHSPEDDWIEFSSEEIREARQQAAASQSPSLPERVQVKAKAASEKDYNLTKVIDYLTNDIGSSSLTNLKYKFEDAKKDGEGGQKRVLKPAIALQEHKLKMPPASMRTSTSEKELCKMADSFFGTDTILESPDDFSQHDQDKSPLSDSGFETRSEKTPSAPQSAETTGPKPLFHEVPIPPVITETRTEVVHVIRSYDPSAGDVPQTQPEEPVSPKPSPTFMELEPKPTTSSIKEKVKAFQMKASSEEDDHNRVLSKGMRVKEETHITTTTRMVYHSPPGGEGASERIEETMSVHDIMKAFQSGRDPSKELAGLFEHKSAVSPDVHKSAAETSAQHAEKDNQMKPKLERIIEVHIEKGNQAEPTEVIIRETKKHPEKEMYVYQKDLSRGDINLKDFLPEKHDAFPCSEEQGQQEEEELTAEESLPSYLESSRVNTPVSQEEDSRPSSAQLISDDSYKTLKLLSQHSIEYHDDELSELRGESYRFAEKMLLSEKLDVSHSDTEESVTDHAGPPSSELQGSDKRSREKIATAPKKEILSKIYKDVSENGVGKVSKDEHFDKVTVLHYSGNVSSPKHAMWMRFTEDRLDRGREKLIYEDRVDRTVKEAEEKLTEVSQFFRDKTEKLNDELQSPEKKARPKNGKEYSSQSPTSSSPEKVLLTELLASNDEWVKARQHGPDGQGFPKAEEKAPSLPSSPEKMVLSQQTEDSKSTVEAKGSISQSKAPDGPQSGFQLKQSKLSSIRLKFEQGTHAKSKDMSQEDRKSDGQSRIPVKKIQESKLPVYQVFAREKQQKAIDLPDESVSVQKDFMVLKTKDEHAQSNEIVVNDSGSDNVKKQRTEMSSKAMPDSFSEQQAKDLACHITSDLATRGPWDKKVFRTWESSGATNNKSQKEKLSHVLVHDVRENHIGHPESKSVDQKNEFMSVTERERKLLTNGSLSEIKEMTVKSPSKKVLYREYVVKEGDHPGGLLDQPSRRSESSAVSHIPVRVADERRMLSSNIPDGFCEQSAFPKHELSQKLSQSSMSKETVETQHFNSIEDEKVTYSEISKVSKHQSYVGLCPPLEETETSPTKSPDSLEFSPGKESPSSDVFDHSPIDGLEKLAPLAQTEGGKEIKTLPVYVSFVQVGKQYEKEIQQGGVKKIISQECKTVQETRGTFYTTRQQKQPPSPQGSPEDDTLEQVSFLDSSGKSPLTPETPSSEEVSYEFTSKTPDSLIAYIPGKPSPIPEVSEESEEEEQAKSTSLKQTTVEETAVEREMPNDVSKDSNQRPKNNRVAYIEFPPPPPLDADQIESDKKHHYLPEKEVDMIEVNLQDEHDKYQLAEPVIRVQPPSPVPPGADVSDSSDDESIYQPVPVKKYTFKLKEVDDEQKEKPKASAEKASNQKELESNGSGKDNEFGLGLDSPQNEIAQNGNNDQSITECSIATTAEFSHDTDATEIDSLDGYDLQDEDDGLTESDSKLPIQAMEIKKDIWNTEGILKPADRSFSQSKLEVIEEEGKVGPDEDKPPSKSSSSEKTPDKTDQKSGAQFFTLEGRHPDRSVFPDTYFSYKVDEEFATPFKTVATKGLDFDPWSNNRGDDEVFDSKSREDETKPFGLAVEDRSPATTPDTTPARTPTDESTPTSEPNPFPFHEGKMFEMTRSGAIDMSKRDFVEERLQFFQIGEHTSEGKSGDQGEGDKSMVTATPQPQSGDTTVETNLERNVETPTVEPNPSIPTSGECQEGTSSSGSLEKSAAATNTSKVDPKLRTPIKMGISASTMTMKKEGPGEITDKIEAVMTSCQGLENETITMISNTANSQMGVRPHEKHDFQKDNFNNNNNLDSSTIQTDNIMSNIVLTEHSAPTCTTEKDNPVKVSSGKKTGVLQGHCVRDKQKVLGEQQKTKELIGIRQKSKLPIKATSPKDTFPPNHMSNTKASKMKQVSQSEKTKALTTSSCVDVKSRIPVKNTPRDNIIAVRKACATQKQGQPEKGKAKQLPSKLPVKVRSTCVTTTTTTATTTTTTTTTTTTSCTVKVRKSQLKEVCKHSIEYFKGISGETLKLVDRLSEEEKKMQSELSDEEESTSRNTSLSETSRGGQPSVTTKSARDKKTEAAPLKSKSEKAGSEKRSSRRTGPQSPCERTDIRMAIVADHLGLSWTELARELNFSVDEINQIRVENPNSLISQSFMLLKKWVTRDGKNATTDALTSVLTKINRIDIVTLLEGPIFDYGNISGTRSFADENNVFHDPVDGWQNETSSGNLESCAQARRVTGGLLDRLDDSPDQCRDSITSYLKGEAGKFEANGSHTEITPEAKTKSYFPESQNDVGKQSTKETLKPKIHGSGHVEEPASPLAAYQKSLEETSKLIIEETKPCVPVSMKKMSRTSPADGKPRLSLHEEEGSSGSEQKQGEGFKVKTKKEIRHVEKKSHS

SEQ ID NO: 1121 - protein, 656 aa, Homo sapiens
GELLCPPPPPPHFRAPGTMSALAGEDVWRCPGCGDHIAPSQIWYRTVNETWHGSCFRCSECQDSLTNWYYEKDGKLYCPKDYWGKFGEFCHGCSLLMTGPFMVAGEFKYHPECFACMSCKVIIEDGDAYALVQHATLYCGKCHNEVVLAPMFERLSTESVQEQLPYSVTLISMPATTEGRRGFSVSVESACSNYATTVQVKEVNRMHISPNNRNAIHPGDRILEINGTPVRTLRVEEVEDAISQTSQTLQLLIEHDPVSQRLDQLRLEARLAPHMQNAGHPHALSTLDTKENLEGTLRRRSLRRSNSISKSPGPSSPKEPLLFSRDISRSESLRCSSSYSQQIFRPCDLIHGEVLGKGFFGQAIKVTHKATGKVMVMKELIRCDEETQKTFLTEVKVMRSLDHPNVLKFIGVLYKDKKLNLLTEYIEGGTLKDFLRSMDPFPWQQKVRFAKGIASGMAYLHSMCIIHRDLNSHNCLIKLDKTVVVADFGLSRLIVEERKRAPMEKATTKKRTLRKNDRKKRYTVVGNPYWMAPEMLNGKSYDETVDIFSFGIVLCEIIGQVYADPDCLPRTLDFGLNVKLFWEKFVPTDCPPAFFPLAAICCRLEPESRPAFSKLEDSFEALSLYLGELGIPLPAELEELDHTVSMQYGLTRDSPP

SEQ ID NO: 1122 - protein, 143 aa, Homo sapiens
GFLFYVVLTDGKPEVFRTSAIKMGRIFLDHIGGTRLFSCANCDTILTNRSELISTRFTGATGRAFLFNKVVNLQYSEVQDRVMLTGRHMVRDVSCKNCNSKLGWIYEFATEDSQRYKEGRVILERALVRESEGFEEHVPSDNS

SEQ ID NO: 1123 - protein, 94 aa, Homo sapiens
HQPAVSASSSTINLMVSTEPLALTETDICKLPKDEGTCRDFILKWYYDPNTKSCARFWYGGCGGNENKFGSQKECEKVCAPVLAKPGVISVMGT

SEQ ID NO: 1124 - protein, 161 aa, Homo sapiens
DPGGLGGRTMDSGTEEYELNGGLPPGTPGSPDASPARWGWRHGPINVNHYASKKSAAESMLDIALLMANASQLKAVVEQGPSFAFYVPLVVLISISLVLQIGVGVLLIFLVKYDLNNPAKHAKLDFLNNLATGLVFIIVVVNIFITAFGVQKPLMDMAPQQ

SEQ ID NO: 1125 - protein, 249 aa, Homo sapiens
RIQCFKTDTKEFVREIKHSSFGRNVFAISYIPGLLFAVNGKPHFGDQEPVQGFVMNFSNGEIIDIFKPVRKHFDMPHDIVASEDGTVYIGDAHTNTVWKFTLTEKLEHRSVKKAGIEVQEIKEAEAVVETKMENKPTSSELQKMQEKQKLIKEPGSGVPVVLITTLLVIPVVVLLAIAIFIRWKKSRAFGGKGSGGLNLGNFFASRKGYSRKGFDRLSTEGSDQEKEDDGSESEEEYSAPLPALAPSSS

SEQ ID NO: 1126 - protein, 1199 aa, Homo sapiens
NPSSSYRSARVGGMSVACVLKRKAVLWQDSFSPHLKHHPQEPANPNMPVVLTSGTGSQAQPQPAANQALAAGTHSSPVPGSIGVAGRSQDDAMVDYFFQRQHGEQLGGGGSGGGGYNNSKHRWPTGDNIHAEHQVRSMDELNHDFQALALEGRAMGEQLLPGKKFWETDESSKDGPKGIFLGDQWRDSAWGTSDHSVSQPIMVQRRPGQSFHVNSEVNSVLSPRSESGGLGVSMVEYVLSSSPGDSCLRKGGFGPRDADSDENDKGEKKNKGTFDGDKLGDLKEEGDVMDKTNGLPVQNGIDADVKDFSRTPGNCQNSANEVDLLGPNQNGSEGLAQLTSTNGAKPVEDFSNMESQSVPLDPMEHVGMEPLQFDYSGTQVPVDSAAATVGLFDYNSQQQLFQRPNALAVQQLTAAQQQQYALAAAHQPHIGLAPAAFVPNPYIISAAPPGTDPYTAGLAAAATLGPAVVPHQYYGVTPWGVYPASLFQQQAAAAAAATNSANQQTTPQAQQGQQQVLRGGASQRPLTPNQNQQGQQTDPLVAAAAVNSALAFGQGLAAGMPGYPVLAPAAYYDQTGALVVNAGARNGLGAPVRLVAPAPVIISSSAAQAAVAAAAASANGAAGGLAGTTNGPFRPLGTQQPQPQPQQQPNNNLASSSFYGNNSLNSNSQSSSLFSQGSAQPANTSLGFGSSSSLGATLGSALGGFGTAVANSNTGSGSRRDSLTGSSDLYKRTSSSLTPIGHSFYNGLSFSSSPGPVGMPLPSQGPGHSQTPPPSLSSHGSSSSLNLGGLTNGSGRYISAAPGAEAKYRSASSASSLFSPSSTLFSSSRLRYGMSDVMPSGRSRLLEDFRNNRYPNLQLREIAGHIMEFSQDQHGSRFIQLKLERATPAERQLVFNEILQAAYQLMVDVFGNYVIQKFFEFGSLEQKLALAERIRGHVLSLALQMYGCRVIQKALEFIPSDQQNEMVRELDGHVLKCVKDQNGNHVVQKCIECVQPQSLQFIIDAFKGQVFALSTHPYGCRVIQRILEHCLPDQTLPILEELHQHTEQLVQDQYGNYVIQHVLEHGRPEDKSKIVAEIRGNVLVLSQHKFASNVVEKCVTHASRTERAVLIDEVCTMNDGPHSALYTMMKDQYANYVVQKMIDVAEPGQRKIVMHKIRPHIATLRKYTYGKHILAKLEKYYMKNGVDLGPICGPPNGII

SEQ ID NO: 1127 - protein, 165 aa, Homo sapiens
LLVDRTMTLEEVRGQDTVPESTARMQGAGKALHELLLSAQRQGCLTAGVYESAKVLNVDPDNVTFCVLAAGEEDEGDIALQIHFTLIQAFCCENDIDIVRVGDVQRLAAIVGAGEEAGAPGDLHCILISNPNEDAWKDPALEKLSLFCEESRSVNDWVPSITLPE

SEQ ID NO: 1128 - protein, 183 aa, Homo sapiens
VRPEIKQSHTAPDPAAAEMLMPKKNRIAIYELLFKEGVMVAKKDVHMPKHPELADKNVPNLHVMKAMQSLKSRGYVKEQFAWRHFYWYLTNEGIQYLRDYLHLPPEIVPATLRRSRPETGRPRPKGLEGERPARLTRGEADRDTYRRSAVPPGADKKAEAGAGSATEFQFRGGFGRGRGQPPQ

SEQ ID NO: 1129 - protein, 920 aa, Homo sapiens
EPSSGTKSLASLLSKTIDLSKLGPGMRMSVGLSLLLPLWGRTFLLLLSVVMAQSHWPSEPSEAVRDWENQLEASMHSVLSDLHEAVPTVVGIPDGTAVVGRSFRVTIPTDLIASSGDIIKVSAAGKEALPSWLHWDSQSHTLEGLPLDTDKGVHYISVSATRLGANGSHIPQTSSVFSIEVYPEDHSDLQSVRTASPDPGEVVSSACAADEPVTVLTVILDADLTKMTPKQRIDLLHRMRSFSEVELHNMKLVPVVNNRLFDMSAFMAGPGNPKKVVENGALLSWKLGCSLNQNSVPDIHGVEAPAREGAMSAQLGYPVVGWHIANKKPPLPKRVRRQIHATPTPVTAIGPPTTAIQEPPSRIVPTPTSPAIAPPTETMAPPVRDPVPGKPTVTIRTRGAIIQTPTLGPIQPTRVSEAGTTVPGQIRPTMTIPGYVEPTAVATPPTTTTKKPRVSTPKPATPSTDSTTTTTRRPTKKPRTPRPVPRVTTKVSITRLETASPPTRIRTTTSGVPRGGEPNQRPELKNHIDRVDAWVGTYFEVKIPSDTFYDHEDTTTDKLKLTLKLREQQLVGEKSWVQFNSNSQLMYGLPDSSHVGKHEYFMHATDKGGLSAVDAFEIHVHRRPQGDRAPARFKAKFVGDPALVLNDIHKKIALVKKLAFAFGDRNCSTITLQNITRGSIVVEWTNNTLPLEPCPKEQIAGLSRRIAEDDGKPRPAFSNALEPDFKATSITVTGSGSCRHLQFIPVVPPRRVPSEAPPTEVPDRDPEKSSEDDVYLHTVIPAVVVAAILLIAGIIAMICYRKKRKGKLTLEDQATFIKKGVPIIFADELDDSKPPPSSSMPLILQEEKAPLPPPEYPNQSVPETTPLNQDTMGEYTPLRDEDPNAPPYQPPPPFTVPMEGKGSRPKNMTPYRSPPPYVPP

SEQ ID NO: 1130 - protein, 185 aa, Homo sapiens
SDRPTMAPGVARGPTPYWRLRLGGAALLLLLIPVAAAQEPPGAACSQNTNKTCEECLKNVSCLWCNTNKACLDYPVTSVLPPASLCKLSSARWGVCWVNFEALIITMSVVGGTLLLGIAICCCCCCRRKRSRKPDRSEEKAMREREERRIRQEERRAEMKTRHDEIRKKYGLFKEENPYARFENN

SEQ ID NO: 1131 - protein, 36 aa, Homo sapiens
SMAEEGTSDSNTGSESNSATVEEPPTDPIPEDEKKE

SEQ ID NO: 1132 - protein, 77 aa, Homo sapiens
MLQERAEPTCCRTQGTGKLRISSSRTWEANHDGRISFDEYLDLDRRHHRPHRQTHPMSRSSRAAARDPFGHTFQALA

SEQ ID NO: 1133 - protein, 2919 aa, Homo sapiens
LTAIVVGKGGWLVDVTAWALSPPAVGTPQPLGYITARQSGAVADLIEPLQQLRAWPRVGGTIVQQLSFPGTLEIAAALICRGRHHCPAAEFPRDLGDSRSPHLQGKMIPARFAGVLLALALILPGTLCAEGTRGRSSTARCSLFGSDFVNTFDGSMYSFAGYCSYLLAGGCQKRSFSIIGDFQNGKRVSLSVYLGEFFDIHLFVNGTVTQGDQRVSMPYASKGLYLETEAGYYKLSGEAYGFVARIDGSGNFQVLLSDRYFNKTCGLCGNFNIFAEDDFMTQEGTLTSDPYDFANSWALSSGEQWCERASPPSSSCNISSGEMQKGLWEQCQLLKSTSVFARCHPLVDPEPFVALCEKTLCECAGGLECACPALLEYARTCAQEGMVLYGWTDHSACSPVCPAGMEYRQCVSPCARTCQSLHINEMCQERCVDGCSCPEGQLLDEGLCVESTECPCVHSGKRYPPGTSLSRDCNTCICRNSQWICSNEECPGECLVTGQSHFKSFDNRYFTFSGICQYLLARDCQDHSFSIVIETVQCADDRDAVCTRSVTVRLPGLHNSLVKLKHGAGVAMDGQDVQLPLLKGDLRIQHTVTASVRLSYGEDLQMDWDGRGRLLVKLSPVYAGKTCGLCGNYNGNQGDDFLTPSGLAEPRVEDFGNAWKLHGDCQDLQKQHSDPCALNPRMTRFSEEACAVLTSPTFEACHRAVSPLPYLRNCRYDVCSCSDGRECLCGALASYAAACAGRGVRVAWREPGRCELNCPKGQVYLQCGTPCNLTCRSLSYPDEECNEACLEGCFCPPGLYMDERGDCVPKAQCPCYYDGEIFQPEDIFSDHHTMCYCEDGFMHCTMSGVPGSLLPDAVLSSPLSHRSKRSLSCRPPMVKLVCPADNLRAEGLECTKTCQNYDLECMSMGCVSGCLCPPGMVRHENRCVALERCPCFHQGKEYAPGETVKIGCNTCVCRDRKWNCTDHVCDATCSTIGMAHYLTFDGLKYLFPGECQYVLVQDYCGSNPGTFRILVGNKGCSHPSVKCKKRVTILVEGGEIELFDGEVNVKRPMKDETHFEVVESGRYIILLLGKALSVVWDRHLSISVVLKQTYQEKVCGLCGNFDGIQNNDLTSSNLQVEEDPVDFGNSWKVSSQCADTRKVPLDSSPATCHNNIMKQTMVDSSCRILTSDVFQDCNKLVDPEPYLDVCIYDTCSCESIGDCACFCDTIAAYAHVCAQHGKVVTWRTATLCPQSCEERNLRENGYECEWRYNSCAPACQVTCQHPEPLACPVQCVEGCHAHCPPGKILDELLQTCVDPEDCPVCEVAGRRFASGKKVTLNPSDPEHCQICHCDVVNLTCEACQEPGGLVVPPTDAPVSPTTLYVEDISEPPLHDFYCSRLLDLVFLLDGSSRLSEAEFEVLKAFVVDMMERLRISQKWVRVAVVEYHDGSHAYIGLKDRKRPSELRRIASQVKYAGSQVASTSEVLKYTLFQIFSKIDRPEASRIALLLMASQEPQRMSRNFVRYVQGLKKKKVIVIPVGIGPHANLKQIRLIEKQAPENKAFVLSSVDELEQQRDEIVSYLCDLAPEAPPPTLPPHMAQVTVGPGLLGVSTLGPKRNSMVLDVAFVLEGSDKIGEADFNRSKEFMEEVIQRMDVGQDSIHVTVLQYSYMVTVEYPFSEAQSKGDILQRVREIRYQGGNRTNTGLALRYLSDHSFLVSQGDREQAPNLVYMVTGNPASDEIKRLPGDIQVVPIGVGPNANVQELERIGWPNAPILIQDFETLPREAPDLVLQRCCSGEGLQIPTLSPAPDCSQPLDVILLLDGSSSFPASYFDEMKSFAKAFISKANIGPRLTQVSVLQYGSITTIDVPWNVVPEKAHLLSLVDVMQREGGPSQIGDALGFAVRYLTSEMHGARPGASKAVVILVTDVSVDSVDAAADAARSNRVTVFPIGIGDRYDAAQLRILAGPAGDSNVVKLQRIEDLPTMVTLGNSFLHKLCSGFVRICMDEDGNEKRPGDVWTLPDQCHTVTCQPDGQTLLKTHRVNCDRGLRPSCPNSQSPVKVEETCGCRWTCPCVCTGSSTRHIVTFDGQNFKLTGSCSYVLFQNKEQDLEVILHNGACSPGARQGCMKSIEVKHSALSVELHSDMEVTVNGRLVSVPYVGGNMEVNVYGAIMHEVRFNHLGHIFTFTPQNNEFQLQLSPKTFASKTYGLCGICDENGANDFMLRDGTVTTDWKTLVQEWTVQRPGQTCQPILEEQCLVPDSSHCQVLLLPLFAECHKVLAPATFYAICQQDSCHQEQVCEVIASYAHLCRTNGVCVDWRTPDFCAMSCPPSLVYNHCEHGCPRHCDGNVSSCGDHPSEGCFCPPDKVMLEGSCVPEEACTQCIGEDGVQHQFLEAWVPDHQPCQICTCLSGRKVNCTTQPCPTAKAPTCGLCEVARLRQNADQCCPEYECVCDPVSCDLPPVPHCERGLQPTLTNPGECRPNFTCACRKEECKRVSPPSCPPHRLPTLRKTQCCDEYECACNCVNSTVSCPLGYLASTATNDCGCTTTTCLPDKVCVHRSTIYPVGQFWEEGCDVCTCTDMEDAVMGLRVAQCSQKPCEDSCRSGFTYVLHEGECCGRCLPSACEVVTGSPRGDSQSSWKSVGSQWASPENPCLINECVRVKEEVFIQQRNVSCPQLEVPVCPSGFQLSCKTSACCPSCRCERMEACMLNGTVIGPGKTVMIDVCTTCRCMVQVGVISGFKLECRKTTCNPCPLGYKEENNTGECCGRCLPTACTIQLRGGQIMTLKRDETLQDGCDTHFCKVNERGEYFWEKRVTGCPPFDEHKCLAEGGKIMKIPGTCCDTCEEPECNDITARLQYVKVGSCKSEVEVDIHYCQGKCASKAMYSIDINDVQDQCSCCSPTRTEPMQVALHCTNGSVVYHEVLNAMECKCSPRKCSK

SEQ ID NO: 1134 - protein, 773 aa, Homo sapiens
  misc_feature (1)...(773): Xaa = any amino acid or nothing
GGRRCRGAGTRLIRCLRVVVSAAPRMRRCNSGSGPPPSLLLLLLWLLAVPGANAAPRSALYSPSDPLTLLQADTVRGAVLGSRSAWAVEFFASWCGHSIAFAPTWKALAEDVKRWRPALYLAALDCAEETNSAVCRDFNIPGFPTVRFFKAFTKNGSGAVFPVAGADVQTLRERLIDALESHHDTWPPACPPLEPAKLEEIDGFFARNNEEYLALIFEKGGSYLGREVALDLSQHKGVAVRRVVNTEANVVRKFGVTDFPSCYLLFRNGSVSRVPVLMESRSFYTAYLQRLSGLTREAAQTTVAPTTANKIAPTVWKLADRSKIYMADLESALHYILRIEVGRFPVLEGQRLVALKKFVAVLAKYFPGRPLVQNFLHSVNEWLKRQKRNKIPYSFFKTALDDRKEGAVLAKKVNWIGCQGSEPHFRGFPCSLWVLFHFXTVQAARDQNVDHSQEAAKAKEVLPAIRGYVHYFFGCRDCASHFEQMAAASMHRVGSPNAAVLWLWSSHNRVNARLAGAPSEDPQFPKVQWPPRELCSACHNERLDVPVWDVEATLNFLKAHFSPSNIILDFPAAGSAARRDVQNVAAAPELAMGALELESRNSTLDPGKPEMMKSPTNTTPHVPAEGPEASRPPKLHPGLRAAPGQEPPEHMAELQRNEQEQPLGQWHLSKRDTGAALLAESRAEKNRLWGPLEVRRVGRSSKQLVDIPEGQLEARAGRGRGQWLQVLGGGFSYLDISLCVGLYSLSFMGLLAMYTYFQAKIRALKGHAGHPAA

SEQ ID NO: 1135 - protein, 100 aa, Homo sapiens
MVKQHNRQSPTHTQPTKPQQTPAATQNNPPESTPPRPTPSYRTDPHSRPIKQPARRHTPPSRHTPDRPPRPHTRRAPRATPEHPHDNTRTLNQLTPTPPL

SEQ ID NO: 1136 - protein, 347 aa, Homo sapiens
LPPALLPTDVAPASGFNTETRNRRPRGEEEGDPVGPATLSARLGASAGAMTSLTQRSSGLVQRRTEASRNAADKERAAGGGAGSSEDDAQSRRDEQDDDDKGDSKETRLTLMEEVLLLGLKDREGYTSFWNDCISSGLRGCMLIELALRGRLQLEACGMRRKSLLTRKVICKSDAPTGDVLLDEALKHVKETQPPETVQNWIELLSGETWNPLKLHYQLRNVRERLAKNLVEKGVLTTEKQNFLLFDMTTHPLTNNNIKQRLIKKVQEAVLDKWVNDPHRMDRRLLALIYLAHASDVLENAFAPLLDEQYDLATKRVRQLLDLDPEVECLKANTNEVLWAVVAAFTK

SEQ ID NO: 1137 - protein, 588 aa, Homo sapiens
TPAALPRGDPAPRRRPTRGCSETIGGGAAAAAAAVGGGETRGEETSEVSEFEGGPRAAAAVMSEDSSALPWSINRDDYELQEVIGSGATAVVQAAYCAPKKEKVAIKRINLEKCQTSMDELLKEIQAMSQCHHPNIVSYYTSFVVKDELWLVMKLLSGGSVLDIIKHIVAKGEHKSGVLDESTIATILREVLEGLEYLHKNGQIHRDVKAGNILLGEDGSVQIADFGVSAFLATGGDITRNKVRKTFVGTPCWMAPEVMEQVRGYDFKADIWSFGITAIELATGAAPYHKYPPMKVLMLTLQNDPPSLETGVQDKEMLKKYGKSFRKMISLCLQKDPEKRPTAAELLRHKFFQKAKNKEFLQEKTLQRAPTISERAKKVRRVPGSSGRLHKTEDGGWEWSDDEFDEESEEGKAAISQLRSPRVKESISNSELFPTTDPVGTLLQVPEQISAHLPQPAGQIATQPTQVSLPPTAEPAKTAQALSSGSGSQETKIPISLVLRLRNSKKELNDIRFEFTPGRDTAEGVSQELISAGLVDGRDLVIVAANLQKIVEEPQSNRSVTFKLASGVEGSDIPDDGKLIGFAQLSIS

SEQ ID NO: 1138 - protein, 709 aa, Homo sapiens
GFQKRCRHRIAQLFAVGALVCCLVLLHLSAMISASRAAAARLVGAAASRGPTAARHQDSWNGLSHEAFRLVSRRDYASEAIKGAVVGIDLGTTNSCVAVMEGKQAKVLENAEGARTTPSVVAFTADGERLVGMPAKRQAVTNPNNTFYATKRLIGRRYDDPEVQKDIKNVPFKIVRASNGDAWVEAHGKLYSPSQIGAFVLMKMKETAENYLGRTAKNAVITVPAYFNDSQRQATKDAGQISGLNVLRVINEPTAAALAYGLDKSEDKVIAVYDLGGGTFDISILEIQKGVFEVKSTNGDTFLGGEDFDQALLRHIVKEFKRETGVDLTKDNMALQRVREAAEKAKCELSSSVQTDINLPYLTMDSSGPKHLNMKLTRAQFEGIVTDLIRRTIAPCQKAMQDAEVSKSDIGEVILVGGMTRMPKVQQTVQDLFGRAPSKAVNPDEAVAIGAAIQGGVLAGDVTDVLLLDVTPLSLGIETLGGVFTKLINRNTTIPTKKSQVFSTAADGQTQVEIKVCQGEREMAGDNKLLGQFTLIGIPPAPRGVPQIEVTFDIDANGIVHVSAKDKGTGREQQIVIQSSGGLSKDDIENMVKNAEKYAEEDRRKKERVEAVNMAEGIIHDTETKMEEFKDQLPADECNKLKEEISKMRELLARKDSETGENIRQAASSLQQASLKLFEMAYKKMASEREGSGSSGTGEQKEDQKEEKQ

SEQ ID NO: 1139 - protein, 221 aa, Homo sapiens
RKKDKSSRPPLTPSLPLSLPPGEEARGGCSAVGAAPPSPGRPGPPPHAAPMHPFYTRAATMIGEIAAAVSFISKFLRTKGLTSERQLQTFSQSLQELLAEHYKHHWFPEKPCKGSGYRCIRINHKMDPLIGQAAQRIGLSSQELFRLLPSELTLWVDPYEVSYRIGEDGSICVLYEASPAGGSTQNSTNVQMVDSRISCKEELLLGRTSPSKNYNMMTVSG

SEQ ID NO: 1140 - protein, 114 aa, Homo sapiens
GTGPEFPGRRFVLIILVITCSEATILLCYFHLCAEDYHWQWRSFLTSGFTAVYFLIYAVHYFFSKLRITGTASTILYFGYTMTMVWIFFLFTGTIAFFACFWLVTKIYSVVKLD

SEQ ID NO: 1141 - protein, 760 aa, Homo sapiens
EEVPEAHRASPREGTSGGERLQDLVKSKMSETSRTAFGGRRAVPPNNSNAAEDDLPTVELQGVVPRGVNLQEFLNVTSVHLFKERWDTNKVDHHTDKYENNKLIVRRGQSFYVQIDLSRPYDPRRDLFRVEYVIGRYPQENKGTYIPVPIVSELQSGKWGAKIVMREDRSVRLSIQSSPKCIVGKFRMYVAVWTPYGVLRTSRNPETDTYILFNPWCEDDAVYLDNEKEREEYVLNDIGVIFYGEVNDIKTRSWSYGQFEDGILDTCLYVMDRAQMDLSGRGNPIKVSRVGSAMVNAKDDEGVLVGSWDNIYAYGVPPSAWTGSVDILLEYRSSENPVRYGQCWVFAGVFNTFLRCLGIPARIVTNYFSAHDNDANLQMDIFLEEDGNVNSKLTKDSVWNYHCWNEAWMTRPDLPVGFGGWQAVDSTPQENSDGMYRCGPASVQAIKHGHVCFQFDAPFVFAEVNSDLIYITAKKDGTHVVENVDATHIGKLIVTKQIGGDGMMDITDTYKFQEGQEEERLALETALMYGAKKPLNTEGVMKSRSNVDMDFEVENAVLGKDFKLSITFRNNSHNRYTITAYLSANITFYTGVPKAEFKKETFDVTLEPLSFKKEAVLIQAGEYMGQLLEQASLHFFVTARINETRDVLAKQKSTVLTIPEIIIKVRGTQVVGSDMTVTVQFTNPLKETLRNVWVHLDGPGVTRPMKKMFREIRPNSTVQWEEVCRPWVSGHRKLIASMSSDSLRHVYGELDVQIQRRPSM

SEQ ID NO: 1142 - protein, 181 aa, Homo sapiens
GGFGEMCEKCPTCPDACSTKRDCVECLLLHSGKPDNQTCHSLCRDEVITWVDTIVKDDQEAVLCFYKTAKDCVMMFTYVELPSGKSNLTVLREPECGNTPNAMTILLAVVGSILLVGLALLAIWKLLVTIHDRREFAKFQSERSRARYEMASNPLYRKPISTHTVDFTFNKFNKSYNGTVD

SEQ ID NO: 1143 - protein, 1388 aa, Homo sapiens
AEPAAKMPAYFQRPENALKRANEFLEVGKKQPALDVLYDVMKSKKHRTWQKIHEPIMLKYLELCVDLRKSHLAKEGLYQYKNICQQVNIKSLEDVVRAYLKMAEEKTEAAKEESQQMVLDIEDLDNIQTPESVLLSAVSGEDTQDRTDRLLLTPWVKFLWESYRQCLDLLRNNSRVERLYHDIAQQAFKFCLQYTRKAEFRKLCDNLRMHLSQIQRHHNQSTAINLNNPESQSMHLETRLVQLDSAISMELWQEAFKAVEDIHGLFSLSKKPPKPQLMANYYNKVSTVFWKSGNALFHASTLHRLYHLSREMRKNLTQDEMQRMSTRVLLATLSIPITPERTDIARLLDMDGIIVEKQRRLATLLGLQAPPTRIGLINDMVRFNVLQYVVPEVKDLYNWLEVEFNPLKLCERVTKVLNWVREQPEKEPELQQYVPQLQNNTILRLLQQVSQIYQSIEFSRLTSLVPFVDAFQLERAIVDAARHCDLQVRIDHTSRTLSFGSDLNYATREDAPIGPHLQSMPSEQIRNQLTAMSSVLAKALEVIKPAHILQEKEEQHQLAVTAYLKNSRKEHQRILARRQTIEERKERLESLNIQREKEELEQREAELQKVRKAEEERLRQEAKEREKERILQEHEQIKKKTVRERLEQIKKTELGAKAFKDIDIEDLEELDPDFIMAKQVEQLEKEKKELQERLKNQEKKIDYFERAKRLEEIPLIKSAYEEQRIKDMDLWEQQEEERITTMQLEREKALEHKNRMSRMLEDRDLFVMRLKAARQSVYEEKLKQFEERLAEERHNRLEERKRQRKEERRITYYREKEEEEQRRAEEQMLKEREERERAERAKREEELREYQERVKKLEEVERKKRQRELEIEERERRREEERRLGDSSLSRKDSRWGDRDSEGTWRKGPEADSEWRRGPPEKEWRRGEGRDEDRSHRRDEERPRRLGDDEDREPSLRPDDDRVPRRGMDDDRGPRRGPEEDRFSRRGADDDRPSWRNTDDDRPPRRIADEDRGNWRHADDDRPPRRGLDEDRGSWRTADEDRGPRRGMDDDRGPRRGGADDERSSWRNADDDRGPRRGLDDDRGPRRGMDDDRGPRRGMDDDRGPRRGMDDDRGPRRGLDDDRGPWRNADDDRIPRRGAEDDRGPWRNMDDDRLSRRADDDRFPRRGDDSRPGPWRPLVKPGGWREKEKAREESWGPPRESRPSEEREWDREKERDRDNQDREENDKDPERERDRERDVDREDRFRRPRDEGGWRRGPAEESSSWRDSSRRDDRDRDDRRRERDDRRDLRERRDLRDDRDRRGPPLRSEREEVSSWRRADDRKDDRVEERDPPRRVPPPALSRDRERDRDREREGEKEKASWRAEKDRESLRRTKNETDEDGWTTVRR

SEQ ID NO: 1144 - protein, 919 aa, Homo sapiens
HLRAVAMSRFFTTGSDSESESSLSGEELVTKPVGGNYGKQPLLLSEDEEDTKRVVRSAKDKRFEELTNLIRTIRNAMKIRDVTKCLEEFELLGKAYGKAKSIVDKEGVPRFYIRILADLEDYLNELWEDKEGKKKMNKNNAKALSTLRQKIRKYNRDFESHITSYKQNPEQSADEDAEKNEEDSEGSSDEDEDEDGVSAATFLKKKSEAPSGESRKFLKKMDDEDEDSEDSEDDEDWDTGSTSSDSDSEEEEGKQTALASRFLKKAPTTDEDKKAAEKKREDKAKKKHDRKSKRLDEEEEDNEGGEWERVRGGVPLVKEKPKMFAKGTEITHAVVIKKLNEILQARGKKGTDRAAQIELLQLLVQIAAENNLGEGVIVKIKFNIIASLYDYNPNLATYMKPEMWGKCLDCINELMDILFANPNIFVGENILEESENLHNADQPLRVRGCILTLVERMDEEFTKIMQNTDPHSQEYVEHLKDEAQVCAIIERVQRYLEEKGTTEEVCRIYLLRILHTYYKFDYKAHQRQLTPPEGSSKSEQDQAENEGEDSAVLMERLCKYIYAKDRTDRIRTCAILCHIYHHALHSRWYQARDLMLMSHLQDNIQHADPPVQILYNRTMVQLGICAFRQGLTKDAHNALLDIQSSGRAKVLLGQVLLLRSLQERNQEQEKVERRRQVPFHLHINLELLECVYLVSAMLLEIPYMAAHESDARRRMISKQFHHQLRVGERQPLLGPPESMREHVVAASKAMKMGDWKTCHSFIINEKMNGKVWDLFPEADKVRTMLVRKIQEESLRTYLFTYSSVYDSISMETLSDMFELDLPTVHSIISKMIINEELMASLDQPTQTVVMHRTEPTAQQNLALQLAEKLGSLVENNERVFDHKQGTYGGYFRDQKDGYRKNEGYMRRGGYRQQQSQTAY

SEQ ID NO: 1145 - protein, 1299 aa, Homo sapiens
LAPGCPPAPATMPRKGTQPSTARRREEGPPPPSPDGASSDAEPEPPSGRTESPATAAETASEELDNRSLEEILNSIPPPPPPAMTNEAGAPRLMITHIVNQNFKSYAGEKILGPFHKRFSCIIGPNGSGKSNVIDSMLFVFGYRAQKIRSKKLSVLIHNSDEHKDIQSCTVEVHFQKIIDKEGDDYEVIPNSNFYVSRTACRDNTSVYHISGKKKTFKDVGNLLRSHGIDLDHNRFLILQGEVEQIAMMKPKGQTEHDEGMLEYLEDIIGCGRLNEPIKVLCRRVEILNEHRGDKLNRVKMVEKEKDALEGEKNIAIEFLTLENEIFRKKNHVCQYYIYELQKRIAEMETQKEKIHEDTKEINEKSNILSNEMKAKNKDVKDTEKKLNKITKFIEENKEKFTQLDLEDVQVREKLKHATSKAKKLEKQLQKDKEKVEEFKSIPAKSNNIINETTTRNNALEKEKEKEEKKLKEVMDSLKQETQGLQKEKESREKELMGFSKSVNEARSKMDVAQSELDIYLSRHNTAVSQLTKAKEALIAASETLKERKAAIRDIEGKLPQTEQELKEKEKELQKLTQEETNFKSLVHDLFQKVEEAKSSLAMNRSRGKVLDAIIQEKKSGRIPGIYGRLGDLGAIDEKYDVAISSCCHALDYIVVDSIDIAQECVNFLKRQNIGVATFIGLDKMAVWAKKMTEIQTPENTPRLFDLVKVKDEKIRQAFYFALRDTLVADNLDQATRVAYQKDRRWRVVTLQGQIIEQSGTMTGGGSKVMKGRMGSSLVIEISEEEVNKMESQLQNDSKKAMQIQEQKVQLEERVVKLRHSEREMRNTLEKFTASIQRLIEQEEYLNVQVKELEANVLATAPDKKKQKLLEENVSAFKTEYDAVAEKAGKVEAEVKRLHNTIVEINNHKLKAQQDKLDKINKQLDECASAITKAQVAIKTADRNLQKAQDSVLRTEKEIKDTEKEVDDLTAELKSLEDKAAEVVKNTNAAEESLPEIQKEHRNLLQELKVIQENEHALQKDALSIKLKLEQIDGHIAEHNSKIKYWHKEISKISLHPIEDNPIEEISVLSPEDLEAIKNPDSITNQIALLEARCHEMKPNLGAIAEYKKKEELYLQRVAELDKITYERDSFRQAYEDLRKQRLNEFMAGFYIITNKLKENYQMLTLGGDAELELVDSLDPFSEGIMFSVRPPKKSWKKIFNLSGGEKTLSSLALVFALHHYKPTPLYFMDEIDAALDFKNVSIVAFYIYEQTKNAQFIIISLRNNMFEISDRLIGIYKTYNITKSVAVNPKEIASKGLC

SEQ ID NO: 1146 - protein, 633 aa, Homo sapiens
PFPSRRTCQEVGWRGGRALSPVPLRRRAKRRPRVRRSPHPPCPHPRAAAASAGRPSASQVRRSDPRQQVATMVKIVTVKTQAYQDQKPGTSGLRKRVKVFQSSANYAENFIQSIISTVEPAQRQEATLVVGGDGRFYMKEAIQLIARIAAANGIGRLVIGQNGILSTPAVSCIIRKIKAIGGIILTASHNPGGPNGDFGIKFNISNGGPAPEAITDKIFQISKTIEEYAVCPDLKVDLGVLGKQQFDLENKFKPFTVEIVDSVEAYATMLRSIFDFSALKELLSGPNRLKICIDAMHGVVGPYVKKILCEELGAPANSAVNCVPLEDFGGHHPDPNLTYAADLVETMKSGEHDFGAAFDGDGDRNMILGKHGFFVNPSDSVAVIAANIFSIPYFQQTGVRGFARSMPTSGALDRVASATKIALYETPTGWKFFGNLMDASKLSLCGEESFGTGSDHIREKDGLWAVLAWLSILATRKQSVEDILKDHWQKYGRNFFTRYDYEEVEAEGANKMMKDLEALMFDRSFVGKQFSANDKVYTVEKADNFEYSDPVDGSISRNQGLRLIFTDGSRIVFRLSGTGSAGATIRLYIDSYEKDVAKINQDPQVMLAPLISIALKVSQLQERTGRTAPTVIT

SEQ ID NO: 1147 - protein, 733 aa, Homo sapiens
PVGAAGAGRGRGRGADVAARPAASGPVRRGGGGRSARPSPARSCGGAQSWFLTAFCRGRVCHQVLGSAPARPDLAPRFSAMALVRGAEPAAGPSRWLPTHVQVTVLRARGLRGKSSGAGSTSDAYTVIQVGREKYSTSVVEKTHGCPEWREECSFELPPGALDGLLRAQEADAGPAPWAASSAAACELVLTTMHRSLIGVDKFLGQATVALDEVFGAGRAQHTQWYKLHSKPGKKEKERGEIEVTIQFTRNNLSASMFDLSMKDKPRSPFSKIRDKMKGKKKYDLESASAILPSSAIEDPDLGSLGKMGKAKGFFLRNKLRKSSLTQSNTSLGSDSTLSSASGSLAYQGPGAELLTRSPSRSSWLSTEGGRDSAQSPKLFTHKRTYSDEANQMRVAPPRALLDLQGHLDAASRSSLCVNGSHIYNEEPQGPVRHRSSISGSLPSSGSLQAVSSRFSEEGPRSTDDTWPRGSRSNSSSEAVLGQEELSAQAKVLAPGASHPGEEEGARLPEGKPVQVATPIVASSEAVAEKEGARKEERKPRMGLFHHHHQGLSRSELGRRSSLGEKGGPILGASPHHSSSGEEKAKSSWFGLREAKDPTQKPSPHPVKPLSAAPVEGSPDRKQSRSSLSIALSSGLEKLKTVTSGSIQPVTQAPQAGQMVDTKRLKDSAVLDQSAKYYHLTHDELISLLLQRERELSQRDEHVQELESYIDRLLVRIMETSPTLLQIPPGPPK

SEQ ID NO: 1148 - protein, 362 aa, Homo sapiens
TSASSVTMVPARLGPAVAMVTGAGRRVLAGWAHARGDYKPRRAAAGPSATLDMALRRPPRLRLCARLPDFFLLLLFRGCLIGAVNLKSSNRTPVVQEFESVELSCIITDSQTSDPRIEWKKIQDEQTTYVFFDNKIQGDLAGRAEILGKTSLKIWNVTRRDSALYRCEVVARNDRKEIDEIVIELTVQVKPVTPVCRVPKAVPVGKMATLHCQESEGHPRPHYSWYRNDVPLPTDSRANPRFRNSSFHLNSETGTLVFTAVHKDDSGQYYCIASNDAGSARCEEQEMEVYDLNIGGIIGGVLVVLAVLALITLGICCAYRRGYFINNKQDGESYKNPGKPDGVNYIRTDEEGDFRHKSSFVI

SEQ ID NO: 1149 - protein, 105 aa, Homo sapiens
  misc_feature (1)...(105): Xaa = any amino acid or nothing
FFFLRWSFTLVAQAGVQXHDLGSLQPPPPGFKRFSCLSLPSSWDYRLMPPCPANFVYYYYCFLVETGFHHVGQASHELLTSGDPPTSASQSAGLQAELPPWFGES

SEQ ID NO: 1150 - protein, 619 aa, Homo sapiens
GAVRRMNTFQDQSGSSSNREPLLRCSDARRDLELAIGGVLRAEQQIKDNLREVKAQIHSCISRHLECLRSREVWLYEQVDLIYQLKEETLQQQAQQLYSLLGQFNCLTHQLECTQNKDLANQVSVCLERLGSLTLKPEDSTVLLFEADTITLRQTITTFGSLKTIQIPEHLMAHASSANIGPFLEKRGCISMPEQKSASGIVAVPFSEWLLGSKPASGYQAPYIPSTDPQDWLTQKQTLENSQTSSRACNFFNNVGGNLKGLENWLLKSEKSSYQKCNSHSTTSSFSIEMEKVGDQELPDQDEMDLSDWLVTPQESHKLRKPENGSRETSEKFKLLFQSYNVNDWLVKTDSCTNCQGNQPKGVEIENLGNLKCLNDHLEAKKPLSTPSMVTEDWLVQNHQDPCKVEEVCRANEPCTSFAECVCDENCEKEALYKWLLKKEGKDKNGMPVEPKPEPEKHKDSLNMWLCPRKEVIEQTKAPKAMTPSRIADSFQVIKNSPLSEWLIRPPYKEGSPKEVPGTEDRAGKQKFKSPMNTSWCSFNTADWVLPGKKMGNLSQLSSGEDKWLLRKKAQEVLLNSPLQEEHNFPPDHYGLPAVCDLFACMQLKVDKEKWLYRTPLQM

SEQ ID NO: 1151 - protein, 469 aa, Homo sapiens
HEGRDHTAMPPSGPRGTLLLLPLLLLLLLRAVLAVPLERGAPNKEETPATESPDTGLYYHRYLQEVIDVLETDGHFREKLQAANAEDIKSGKLSRELDFVSHHVRTKLDELKRQEVSRLRMLLKAKMDAEQDPNVQVDHLNLLKQFEHLDPQNQHTFEARDLELLIQTATRDLAQYDAAHHEEFKRYEMLKEHERRRYLESLGEEQRKEAERKLEEQQRRHREHPKVNVPGSQAQLKEVWEELDGLDPNRFNPKTFFILHDINSDGVLDEQELEALFTKELEKVYDPKNEEDDMREMEEERLRMREHVMKNVDTNQDRLVTLEEFLASTQRKEFGDTGEGWETVEMHPAYTEEELRRFEEELAAREAELNAKAQRLSQETEALGRSQGRLEAQKRELQQAVLHMEQRKQQQQQQQGHKAPAAHPEGQLKFHPDTDDVPVPAPAGDQKEVDTSEKKLLERLPEVEVPQHL

SEQ ID NO: 1152 - protein, 974 aa, Homo sapiens
RRSRLFRSVSRCCSCERPASPSRPPSAAGSQPAPRLDSLSPTPTPTLTPPVRPAAPLVAFASPHMASSAQSGGSSGGPAVPTVQRGIIKMVLSGCAIIVRGQPRGGPPPERQINLSNIRAGNLARRAAATQPDAKDTPDEPWAFPAREFLRKKLIGKEVCFTIENKTPQGREYGMIYLGKDTNGENIAESLVAEGLATRREGMRANNPEQNRLSECEEQAKAAKKGMWSEGNGSHTIRDLKYTIENPRHFVDSHHQKPVNAIIEHVRDGSVVRALLLPDYYLVTVMLSGIKCPTFRREADGSETPEPFAAEAKFFTESRLLQRDVQIILESCHNQNILGTILHPNGNITELLLKEGFARCVDWSIAVYTRGAEKLRAAERFAKERRLRIWRDYVAPTANLDQKDKQFVAKVMQVLNADAIVVKLNSGDYKTIHLSSIRPPRLEGENTQDKNKKLRPLYDIPYMFEAREFLRKKLIGKKVNVTVDYIRPASPATETVPAFSERTCATVTIGGINIAEALVSKGLATVIRYRQDDDQRSSHYDELLAAEARAIKNGKGLHSKKEVPIHRVADISGDTQKAKQFLPFLQRAGRSEAVVEYVFSGSRLKLYLPKETCLITFLLAGIECPRGARNLPGLVQEGEPFSEEATLFTKELVLQREVEVEVESMDKAGNFIGWLHIDGANLSVLLVEHALSKVHFTAERSSYYKSLLSAEEAAKQKKEKVWAHYEEQPVEEVMPVLEEKERSASYKPVFVTEITDDLHFYVQDVETGTQLEKLMENMRNDIASHPPVEGSYAPRRGEFCIAKFVDGEWYRARVEKVESPAKIHVFYIDYGNREVLPSTRLGTLSPAFSTRVLPAQATEYAFAFIQVPQDDDARTDAVDSVVRDIQNTQCLLNVEHLSAGCPHVTLQFADSKGDVGLGLVKEGLVMVEVRKEKQFQKVITEYLNAQESAKSARLNLWRYGDFRADDADEFGYSR

SEQ ID NO: 1153 - protein, 81 aa, Homo sapiens
SCPFSPTPSPHHHLCGLHGTPTGLASPRGWASTTCSRHAPVSETGLPRQPPSPPQGGTVPRTHPLTPERAPAQNGNLREEL

SEQ ID NO: 1154 - protein, 495 aa, Homo sapiens
SPHPLSGRPPARRLLRAPASLARAVTMSQAYSSSQRVSSYRRTFGGAPGFPLGSPLSSPVFPRAGFGSKGSSSSVTSRVYQVSRTSGGAGGLGSLRASRLGTTRTPSSYGAGELLDFSLADAVNQEFLTTRTNEKVELQELNDRFANYIEKVRFLEQQNALAAEVNRLKGREPTRVAELYEEELRELRRQVEVLTNQRARVDVERDNLLDDLQRLKAKLQEEIQLKEEAENNLAAFRADVDAATLARIDLERRIESLNEEIAFLKKVHEEEIRELQAQLQEQQVQVEMDMSKPDLTAALRDIRAQYETIAAKNISEAEEWYKSKVSDLTQAANKNNDALRQAKQEMMEYRHQIQSYTCEIDALKGTNDSLMRQMRELEDRFASEASGYQDNIARLEEEIRHLKDEMARHLREYQDLLNVKMALDVEIATYRKLLEGEESRINLPIQTYSALNFRETSPEQRGSEVHTKKTVMIKTIETRDGEVVSEATQQQHEVL

SEQ ID NO: 1155 - protein, 4419 aa, Homo sapiens
PASGRLRAARSGRRGASERESGAGRAMGWRAPGALLLALLLHGRLLAVTHGLRAYDGLSLPEDIETVTASQMRWTHSYLSDDEYMLADSISGDDLGSGDLGSGDFQMVYFRALVNFTRSIEYSPQLEDAGSREFREVSEAVVDTLESEYLKIPGDQVVSVVFIKELDGWVFVELDVGSEGNADGAQIQEMLLRVISSGSVASYVTSPQGFQFRRLGTVPQFPRACTEAEFACHSYNECVALEYRCDRRPDCRDMSDELNCEEPVLGISPTFSLLVETTSLPPRPETTIMRQPPVTHAPQPLLPGSVRPLPCGPQEAACRNGHCIPRDYLCDGQEDCEDGSDELDCGPPPPCEPNEFPCGNGHCALKLWRCDGDFDCEDRTDEANCPTKRPEEVCGPTQFRCVSTNMCIPASFHCDEESDCPDRSDEFGCMPPQVVTPPRESIQASRGQTVTFTCVAIGVPAPFLINWRLNWGHIPSQPRVTVTSEGGRGTLIIRDVKESDQGAYTCEAMNARGMVFGIPDGVLELVPQRAGPCPDGHFYLEHSAACLPCFCFGITSVCQSTRRFRDQIRLRFDQPDDFKGVNVTMPAQPGTPPLSSTQLQIDPSLHEFQLVDLSRRFLVHDSFWALPEQFLGNKVDSYGGSLRYNVRYELARGMLEPVQRPDVVLVGAGYRLLSRGHTPTQPGALNQRQVQFSEEHWVHESGRPVQRAELLQVLQSLEAVLIQTVYNTKMASVGLSDIAMDTTVTHATSHGRAHSVEECRCPIGYSGLSCESCDAHFTRVPGGPYLGTCSGCSCNGHASSCDPVYGHCLNCQHNTEGPQCKKCKAGFFGDAMKATATSCRPCPCPYIDASRRFSDTCFLDTDGQATCDACAPGYTGRRCESCAPGYEGNPIQPGGKCRPVNQEIVRCDERGSMGTSGEACRCKNNVVGRLCNECADRSFHLSTRNPDGCLKCFCMGVSRHCTSSSWSRAQLHGASEEPGHFSLTNAASTHTTNEGIFSPTPGELGFSSFHRLLSGPYFWSLPSRFLGDKVTSYGGELRFTVTQRSQPGSTPLHGQPLVVLQGNNIILEHHVAQEPSPGQPSTFIVPFREQAWQRPDGQPATREHLLMALAGIDTLLIRASYAQQPAESRVSGISMDVAVPEETGQDPALEVEQCSCPPGYRGPSCQDCDTGYTRTPSGLYLGTCERCSCHGHSEACEPETGACQGCQHHTEGPRCEQCQPGYYGDAQRGTPQDCQLCPCYGDPAAGQAAHTCFLDTDGHPTCDACSPGHSGRHCERCAPGYYGNPSQGQPCQRDSQVPGPIGCNCDPQGSVSSQCDAAGQCQCKAQVEGLTCSHCRPHHFHLSASNPDGCLPCFCMGITQQCASSAYTRHLISTHFAPGDFQGFALVNPQRNSRLTGEFTVEPVPEGAQLSFGNFAQLGHESFYWQLPETYQGDKVAAYGGKLRYTLSYTAGPQGSPLSDPDVQITGNNIMLVASQPALQGPERRSYEIMFREEFWRRPDGQPATREHLLMALADLDELLIRATFSSVPLVASISAVSLEVAQPGPSNRPRALEVEECRCPPGYIGLSCQDCAPGYTRTGSGLYLGHCELCECNGHSDLCHPETGACSQCQHNAAGEFCELCAPGYYGDATAGTPEDCQPCACPLTNPENMFSRTCESLGAGGYRCTACEPGYTGQYCEQCGPGYVGNPSVQGGQCLPETNQAPLVVEVHPARSIVPQGGSHSLRCQVSGRGPHYFYWSREDGRPVPSGTQQRHQGSELHFPSVQPSDAGVYICTCRNLHRSNTSRAELLVTEAPSKPITVTVEEQRSQSVRPGADVTFICTAKSKSPAYTLVWTRLHNGKLPTRAMDFNGILTIRNVQLSDAGTYVCTGSNMFAMDQGTATLHVQASGTLSAPVVSIHPPQLTVQPGQLAEFRCSATGSPTPTLEWTGGPGGQLPAKAQIHGGILRLPAVEPTDQAQYLCRAHSSAGQQVARAVLHVHGGGGPRVQVSPERTQVHAGRTVRLYCRAAGVPSATITWRKEGGSLPPQARSERTDIATLLIPAITTADAGFYLCVATSPAGTAQARIQVVVLSASDASQPPVKIESSSPSVTEGQTLDLNCVVAGSAHAQVTWYRRGGSLPHHTQVHGSRLRLPQVSPADSGEYVCRVENGSGPKEASITVSVLHGTHSGPSYTPVPGSTRPIRIEPSSSHVAEGQTLDLNCVVPGQAHAQVTWHKRGGSLPARHQTHGSLLRLHQVTPADSGEYVCHVVGTSGPLEASVLVTIEASVIPGPIPPVRIESSSSTVAEGQTLDLSCVVAGQAHAQVTWYKRGGSLPARHQVRGSRLYIFQASPADAGQYVCRASNGMEASITVTVTGTQGANLAYPAGSTQPIRIEPSSSQVAEGQTLDLNCVVPGQSHAQVTWHKRGGSLPVRHQTHGSLLRLYQASPADSGEYVCRVLGSSVPLEASVLVTIEPAGSVPALGVTPTVRIESSSSQVAEGQTLDLNCLVAGQAHAQVTWHKRGGSLPARHQVHGSRLRLLQVTPADSGEYVCRVVGSSGTQEASVLVTIQQRLSGSHSQGVAYPVRIESSSASLANGHTLDLNCLVASQAPHTITWYKRGGSLPSRHQIVGSRLRIPQVTPADSGEYVCHVSNGAGSRETSLIVTIQGSGSSHVPRVSPPIRIESSSPTVVEGQTLDLNCVVARQPQAIITWYKRGGSLPSRHQTHGSHLRLHQMSVADSGEYVCRANNNIDALEASIVISVSPSAGSPSAPGSSMPIRIESSSSHVAEGETLDLNCVVPGQAHAQVTWHKRGGSLPSYHQTRGSRLRLHHVSPADSGEYVCRVMGSSGPLEASVLVTIEASGSSAVHVPAPGGAPPIRIEPSSSRVAEGQTLDLKCVVPGQAHAQVTWHKRGGNLPARHQVHGPLLRLNQVSPADSGEYSCQVTGSSGTLEASVLVTIEPSSPGPIPAPGLAQPIYIEASSSHVTEGQTLDLNCVVPGQAHAQVTWYKRGGSLPARHQTHGSQLRLHHVSPADSGEYVCRAAGGPGPEQEASFTVTVPPSEGSSYRLRSPVISIDPPSSTVQQGQDASFKCLIHDGAAPISLEWKTRNQELEDNVHISPNGSIITIVGTRPSNHGTYRCVASNAYGVAQSVVNLSVHGPPTVSVLPEGPVWVKVGKAVTLECVSAGEPRSSARWTRISSTPAKLEQRTYGLMDSHTVLQISSAKPSDAGTYVCLAQNALGTAQKQVEVIVDTGAMAPGAPQVQAEEAELTVEAGHTATLRCSATGSPARTIHWSKLRSPLPWQHRLEGDTLIIPRVAQQDSGQYICNATSPAGHAEATIILHVESPPYATTVPEHASVQAGETVQLQCLAHGTPPLTFQWSRVGSSLPGRATARNELLHFERAAPEDSGRYRCRVTNKVGSAEAFAQLLVQGPPGSLPATSIPAGSTPTVQVTPQLETKSIGASVEFHCAVPSDRGTQLRWFKEGGQLPPGHSVQDGVLRIQNLDQSCQGTYICQAHGPWGKAQASAQLVIQALPSVLINIRTSVQTVVVGHAVEFECLALGDPKPQVTWSKVGGHLRPGIVQSGGVVRIAHVELADAGQYRCTATNAAGTTQSHVLLLVQALPQISMPQEVRVPAGSAAVFPCIASGYPTPDISWSKLDGSLPPDSRLENNMLMLPSVQPQDAGTYVCTATNRQGKVKAFAHLQVPERVVPYFTQTPYSFLPLPTIKDAYRKFEIKITFRPDSADGMLLYNGQKRVPGSPTNLANRQPDFISFGLVGGRPEFRFDAGSGMATIRHPTPLALGHFHTVTLLRSLTQGSLIVGDLAPVNGTSQGKFQGLDLNEELYLGGYPDYGAIPKAGLSSGFIGCVRELRIQGEEIVFHDLNLTAHGISHCPTCRDRPCQNGGQCHDSESSSYVCVCPAGFTGSRCEHSQALHCHPEACGPDATCVNRPDGRGYTCRCHLGRSGLRCEEGVTVTTPSLSGAGSYLALPALTNTHHELRLDVEFKPLAPDGVLLFSGGKSGPVEDFVSLAMVGGHLEFRYELGSGLAVLRTAEPLALGRWHRVSAERLNKDGSLRVNGGRPVLRSSPGKSQGLNLHTLLYLGGVEPSVPLSPATNMSAHFRGCVGEVSVNGKRLDLTYSFLGSQGIGQCYDSSPCERQPCQHGATCMPAGEYEFQCLCRDGIKGDLCEHEENPCQLREPCLHGGTCQGTRCLCLPGFSGPRCQQGSGHGIAESDWHLEGSGGNDAPGQYGAYFHDDGFLAFPGHVFSRSLPEVPETIELEVRTSTASGLLLWQGVEVGEAGQGKDFISLGLQDGHLVFRYQLGSGEARLVSEDPINDGEWHRVTALREGRRGSIQVDGEELVSGRSPGPNVAVNAKGSIYIGGAPDVATLTGGRFSSGITGCVKNLVLHSARPGAPPPQPLDLQHRAQAGANTRPCPS

SEQ ID NO: 1156 - protein, 124 aa, Homo sapiens
  misc_feature (1)...(124): Xaa = any amino acid or nothing
KPFSRPYAPQQIFFFFVLLFLXMESHSVAQAGVQWHDLGLLQLPPPRFKXFLANFCIFSRDSISPCWPGWSXTPDLKXSARLGLPKCXDYRREPPCLALFHMSLNKLLTLFHLGLLSGNGAENT

SEQ ID NO: 1157 - protein, 86 aa, Homo sapiens
GSEAWVANSARGLAADLWCVLSRLSCAKMLQSIIKNIWIPMKPYYTKVYQEIWIGMGLMGFIVYKIRAADKRSKALKASAPAPGHH

SEQ ID NO: 1158 - protein, 543 aa, Homo sapiens
PGGCQPGSITVNSPRWKMVNKDMNGFPVKKCSAFQFFKKRVRRWIKSPMVSVDKHQSPSLKYTGSSMVHIPPGEPDFESSLCQTCLGEHAFQRGVLPQENESCSWETQSGCEVREPCNHANILTKPDPRTFWTNDDPAFMKQRRMGLNDFIQKIANNSYACKHPEVQSILKISQPQEPELMNANPSPPPSPSQQINLGPSSNPHAKPSDFHFLKVIGKGSFGKVLLARHKAEEVFYAVKVLQKKAILKKKEEKHIMSERNVLLKNVKHPFLVGLHFSFQTADKLYFVLDYINGGELFYHLQRERCFLEPRARFYAAEIASALGYLHSLNIVYRDLKPENILLDSQGHIVLTDFGLCKENIEHNSTTSTFCGTPEYLAPEVLHKQPYDRTVDWWCLGAVLYEMLYGLPPFYSRNTAEMYDNILNKPLQLKPNITNSARHLLEGLLQKDRTKRLGAKDDFMEIKSHVFFSLINWDDLINKKITPPFNPNVSGPNDLRHFDPEFTEEPVPNSIGKSPDSVLVTASVKEAAEAFLGFSYAPPTDSFL

SEQ ID NO: 1159 - protein, 134 aa, Homo sapiens
KEHTGRLVIGDHKSTSHFRTGEEDKKINEELESQYQQSMDSKLSGRYRRHCGLGFSEVEDHDGEGDVAGDDDDDDDDSPDPESPDDSESDSESEKEESAEELQAAEHPDEVEDPKNKKDAKSNYKMMFVKSSGS

SEQ ID NO: 1160 - protein, 121 aa, Homo sapiens
MYQPIQTYPWMNLSRRREFRCLSCSECLLVTCLGLSTVILGLIVVLQDPSDSVVFSTGLTMIAIGAFFVVLTGVTALCTVTVDENLQKTTRLRLGVIRKSGSLQGTTEPSMTHSIIASTSL

SEQ ID NO: 1161 - protein, 98 aa, Homo sapiens
GCGNHHLPLPTTPLLNTTSSHNLVMKHLPGADPELVLLGRRYEELERIPLSEMTREEINALVQELGFYRKAAPDAQVPPEYVWAPAKPPEETSDHADL

SEQ ID NO: 1162 - protein, 201 aa, Homo sapiens
LRPDPPFPMQSLMQAPLLIALGLLLATPAQAHLKKPSQLSSFSWDNCDEGKDPAVIRSLTLEPDPIVVPGNVTLSVVGSTSVPLSSPLKVDLVLEKEVAGLWIKIPCTDYIGSCTFEHFCDVLDMLIPTGEPCPEPLRTYGLPCHCPFKEGTYSLPKSEFVVPDLELPSWLTTGNYRIESVLSSSGKRLGCIKIAASLKGI

SEQ ID NO: 1163 - protein, 399 aa, Homo sapiens
NKRVLKTKKRRSGRGGQDPGLHPHRSEATAGRSPPTPTVTLGPDCPPPPPPPPPNNNNNNNSKHTGHKSACVPNMTERRRDELSEEINNLREKVMKQSEENNNLQSQVQKLTEENTTLREQVEPTPEDEDDDIELRGAAAAAAPPPPIEEECPEDLPEKFDGNPDMLAPFMAQCQIFMEKSTRDFSVDRVRVCFVTSMMTGRAARWASAKLERSHYLMHNYPAFMMEMKHVFEDPQRREVAKRKIRRLRQGMGSVIDYSNAFQMIAQDLDWNEPALIDQYHEGLSDHIQEELSHLEVAKSLSALIGQCIHIERRLARAAAARKPRSPPRALVLPHIASHHQVDPTEPVGGARMRLTQEEKERRRKLNLCLYCGTGGHYADNCPAKASKSSPAGNSPAPL

SEQ ID NO: 1164 - protein, 765 aa, Homo sapiens
ACGDGTALSHSLFPLPLLPAAPTMGGRVFLAFCVWLTLPGAETQDSRGCARWCPQNSSCVNATACRCNPGFSSFSEIITTPTETCDDINECATPSKVSCGKFSDCWNTEGSYDCVCSPGYEPVSGAKTFKNESENTCQDVDECSSGQHQCDSSTVCFNTVGSYSCRCRPGWKPRHGIPNNQKDTVCEDMTFSTWTPPPGVHSQTLSRFFDKVQDLGRDSKTSSAEVTIQNVIKLVDELMEAPGDVEALAPPVRHLIATQLLSNLEDIMRILAKSLPKGPFTYISPSNTELTLMIQERGDKNVTMGQSSARMKLNWAVAAGAEDPGPAVAGILSIQNMTTLLANASLNLHSKKQAELEEIYESSIRGVQLRRLSAVNSIFLSHNNTKELNSPILFAFSHLESSDGEAGRDPPAKDVMPGPRQELLCAFWKSDSDRGGHWATEGCQVLGSKNGSTTCQCSHLSSFAILMAHYDVEDWKLTLITRVGLALSLFCLLLCILTFLLVRPIQGSRTTIHLHLCICLFVGSTIFLAGIENEGGQVGLRCRLVAGLLHYCFLAAFCWMSLEGLELYFLVVRVFQGQGLSTRWLCLIGYGVPLLIVGVSAAIYSKGYGRPRYCWLDFEQGFLWSFLGPVTFIILCNAVIFVTTVWKLTQKFSEINPDMKKLKKARALTITAIAQLFLLGCTWVFGLFIFDDRSLVLTYVFTILNCLQGAFLYLLHCLLNKKVREEYRKWACLVAGGSKYSEFTSTTSGTGHNQTRALRASESGI

SEQ ID NO: 1165 - protein, 518 aa, Homo sapiens
AGERRSHARRHPRTRRSQSHQRSAAMEPSSKKLTGRLMLAVGGAVLGSLQFGYNTGVINAPQKVIEEFYNQTWVHRYGESILPTTLTTLWSLSVAIFSVGGMIGSFSVGLFVNRFGRRNSMLMMNLLAFVSAVLMGFSKLGKSFEMLILGRFIIGVYCGLTTGFVPMYVGEVSPTAFRGALGTLHQLGIVVGILIAQVFGLDSIMGNKDLWPLLLSIIFIPALLQCIVLPFCPESPRFLLINRNEENRAKSVLKKLRGTADVTHDLQEMKEESRQMMREKKVTILELFRSPAYRQPILIAVVLQLSQQLSGINAVFYYSTSIFEKAGVQQPVYATIGSGIVNTAFTVVSLFVVERAGRRTLHLIGLAGMAGCAILMTIALALLEQLPWMSYLSIVAIFGFVAFFEVGPGPIPWFIVAELFSQGPRPAAIAVAGFSNWTSNFIVGMCFQYVEQLCGPYVFIIFTVLLVLFFIFTYFKVPETKGRTFDEIASGFRQRGEASQSDKTPEELFHPLGADSQV

SEQ ID NO: 1166 - protein, 361 aa, Homo sapiens
RGFQRREPSRDMATTAAPAGGARNGAGPEWGGFEENIQGGGSAVIDMENMDDTSGSSFEDMGELHQRLREEEVDADAADAAAAEEEDGEFLGMKGFKGQLSRQVADQMWQAGKRQASRAFSLYANIDILRPYFDVEPAQVRSRLLESMIPIKMVNFPQKIAGELYGPLMLVFTLVAILLHGMKTSDTIIREGTLMGTAIGTCFGYWLGVSSFIYFLAYLCNAQITMLQMLALLGYGLFGHCIVLFITYNIHLHALFYLFWLLVGGLSTLRMVAVLVSRTVGPTQRLLLCGTLAALHMLFLLYLHFAYHKVVEGILDTLEGPNIPPIQRVPRDIPAMLPAARLPTTVLNATAKAVAVTLQSH

SEQ ID NO: 1167 - protein, 298 aa, Homo sapiens
RAEEPGAMERKRWECPALPQGWEREEVPRRSGLSAGHRDVFYYSPSGKKFRSKPQLARYLGGSMDLSTFDFRTGKMLMSKMNKSRQRVRYDSSNQVKGKPDLNTALPVRQTASIFKQPVTKITNHPSNKVKSDPQKAVDQPRQLFWEKKLSGLNAFDIAEELVKTMDLPKGLQGVGPGCTDETLLSAIASALHTSTMPITGQLSAAVEKNPGVWLNTTQPLCKAFMVTDEDIRKQEELVQQVRKRLEEALMADMLAHVEELARDGEAPLDKACAEDDDEEDEEEEEEEPDPDPEMEHV

SEQ ID NO: 1168 - protein, 529 aa, Homo sapiens
AARTLLAGPRLPGVPGPAGAQSMAGAGPKRRALAAPAAEEKEEAREKMLAAKSADGSAPAGEGEGVTLQRNITLLNGVAIIVGTIIGSGIFVTPTGVLKEAGSPGLALVVWAACGVFSIVGALCYAELGTTISKSGGDYAYMLEVYGSLPAFLKLWIELLIIRPSSQYIVALVFATYLLKPLFPTCPVPEEAAKLVACLCVLLLTAVNCYSVKAATRVQDAFAAAKLLALALIILLGFVQIGKGDVSNLDPNFSFEGTKLDVGNIVLALYSGLFAYGGWNYLNFVTEEMINPYRNLPLAIIISLPIVTLVYVLTNLAYFTTLSTEQMLSSEAVAVDFGNYHLGVMSWIIPVFVGLSCFGSVNGSLFTSSRLFFVGSREGHLPSILSMIHPQLLTPVPSLVFTCVMTLLYAFSKDIFSVINFFSFFNWLCVALAIIGMIWLRHRKPELERPIKVNLALPVFFILACLFLIAVSFWKTPVECGIGFTIILSGLPVYFFGVWWKNKPKWLLQGIFSTTVLCQKLMQVVPQET

SEQ ID NO: 1169 - protein, 46 aa, Homo sapiens
MGVSLEQADAVSKKKKKKVGAWRKFNIWGGREEGVKTGEGGPKRGG

SEQ ID NO: 1170 - protein, 414 aa, Homo sapiens
VPRLSRPSPSQSSPTPTTARGSETRPRRRRQQLQHHLHPPAMEDLDQSPLVSSSDSPPRPQPAFKYQFVREPEDEEEEEEEEEEDEDEDLEELEVLERKPAAGLSAAPVPTAPAAGAPLMDFGNDFVPPAPRGPLPAAPPVAPERQPSWDPSPVSSTVPAPSPLSAAAVSPSKLPEDDEPPARPPPPPPASVSPQAEPVWTPPAPAPAAPPSTPAAPKRRGSSGSVVVDLLYWRDIKKTGVVFGASLFLLLSLTVFSIVSVTAYIALALLSVTISFRIYKGVIQAIQKSDEGHPFRAYLESEVAISEELVQKYSNSALGHVNCTIKELRRLFLVDDLVDSLKFAVLMWVFTYVGALFNGLTLLILALISLFSVPVIYERHQAQIDHYLGLANKNVKDAMAKIQAKIPGLKRKAE

SEQ ID NO: 1171 - protein, 776 aa, Homo sapiens
LAPPRQLESTSSAVRLTEMLRACQLSGVTAAAQSCLCGKFVLRPLRPCRRYSTSGSSGLTTGKIAGAGLLFVGGGIGGTILYAKWDSHFRESVEKTIPYSDKLFEMVLGPAAYNVPLPKKSIQSGPLKISSVSEVMKESKQSASQLQKQKGDTPASATAPTEAAQIISAAGDTLSVPAPAVQPEESLKTDHPEIGEGKPTPALSEEASSSSIRERPPEEVAARLAQQEKQEQVKIESLAKSLEDALRQTASVTLQAIAAQNAAVQAVNAHSNILKAAMDNSEIAGEKKSAQWRTVEGALKERRKAVDEAADALLKAKEELEKMKSVIENAKKKEVAGAKPHITAAEGKLHNMIVDLDNVVKKVQAAQSEAKVVSQYHELVVQARDDFKRELDSITPEVLPGWKGMSVSDLADKLSTDDLNSLIAHAHRRIDQLNRELAEQKATEKQHITLALEKQKLEEKRAFDSAVAKALEHHRSEIQAEQDRKIEEVRDAMENEMRTQLRRQAAAHTDHLRDVLRVQEQELKSEFEQNLSEKLSEQELQFRRLSQEQVDNFTLDINTAYARLRGIEQAVQSHAVAEEEARKAHQLWLSVEALKYSMKTSSAETPTIPLGSAVEAIKANCSDNEFTQALTAAIPPESLTRGVYSEETLRARFYAVQKLARRVAMIDETRNSLYQYFLSYLQSLLLFPPQQLKPPPELCPEDINTFKLLSYASYCIEHGDLELAAKFVNQLKGESRRVAQDWLKEARMTLETKQIVEILTAYASAVGIGTTQVQPE

SEQ ID NO: 1172 - protein, 138 aa, Homo sapiens
ARGRAVEPPPGRCWSTPPVAPPARSASAAAMGVQVETISPGDGRTFPKRGQTCVVHYTGMLEDGKKFDSSRDRNKPFKFMLGKQEVIRGWEEGVAQMSVGQRAKLTISPDYAYGATGHPGIIPPHATLVFDVELLKLE

SEQ ID NO: 1173 - protein, 75 aa, Homo sapiens
FFLYGRRYCGNQEGMEKKFFSLQQINVRKLLQSSGYLRFKIKCLGKIPMDDFLGAILSTLRFLNNEFPLMSSLQY

SEQ ID NO: 1174 - protein, 247 aa, Homo sapiens
AQGKDQMWYEDALASSHPIILYLHGNAGTRGGDHRVELYKVLSSLGYHVVTFDYRGWGDSVGTPSERGMTYDALHVFDWIKARSGDNPVYIWGHSLGTGVATNLVRRLCERETPPDALILESPFTNIREEAKSHPFSVIYRYFPGFDWFFLDPITSSGIKFANDENVKHISCPLLILHAEDDPVVPFQLGRKLYSIAAPARSFRDFKVQFVPFHSDLGYRHKYIYKSPELPRILREFLGKSEPEHQH

SEQ ID NO: 1175 - protein, 109 aa, Homo sapiens
KNLACARPEPAVLQAPSILLDAPRTDGGDMGRAMVARLGLGLLLLALLLPTQIYSSETTTGTSSNSSQSTSNSGLAPNPTNATTKAAGGALQSTASLFVVSLSLLHLYS

SEQ ID NO: 1176 - protein, 820 aa, Homo sapiens
AGTWEPRPCDQAKETGAPGSQPPVPPMELRPWLLWVVAATGTLVLLAADAQGQKVFTNTWAVRIPGGPAVANSVARKHGFLNLGQIFGDYYHFWHRGVTKRSLSPHRPRHSRLQREPQVQWLEQQVAKRRTKRDVYQEPTDPKFPQQWYLSGVTQRDLNVKAAWAQGYTGHGIVVSILDDGIEKNHPDLAGNYDPGASFDVNDQDPDPQPRYTQMNDNRHGTRCAGEVAAVANNGVCGVGVAYNARIGGVRMLDGEVTDAVEARSLGLNPNHIHIYSASWGPEDDGKTVDGPARLAEEAFFRGVSQGRGGLGSIFVWASGNGGREHDSCNCDGYTNSIYTLSISSATQFGNVPWYSEACSSTLATTYSSGNQNEKQIVTTDLRQKCTESHTGTSASAPLAAGIIALTLEANKNLTWRDMQHLVVQTSKPAHLNANDWATNGVGRKVSHSYGYGLLDAGAMVALAQNWTTVAPQRKCIIDILTEPKDIGKRLEVRKTVTACLGEPNHITRLEHAQARLTLSYNRRGDLAIHLVSPMGTRSTLLAARPHDYSADGFNDWAFMTTHSWDEDPSGEWVLEIENTSEANNYGTLTKFTLVLYGTAPEGLPVPPESSGCKTLTSSQACVVCEEGFSLHQKSCVQHCPPGFAPQVLDTHYSTENDVETIRASVCAPCHASCATCQGPALTDCLSCPSHASLDPVEQTCSRQSQSSRESPPQQQPPRLPPEVEAGQRLRAGLLPSHLPEVVAGLSCAFIVLVFVTVFLVLQLRSGFSFRGVKVYTMDRGLISYKGLPPEAWQEECPSDSEEDEGRGERTAFIKDQSAL

SEQ ID NO: 1177 - protein, 253 aa, Homo sapiens
LRLLRSGTLSSSANALASVLTMPSLWDRFSSSSTSSSPSSLPRTPTPDRPPRSAWGSATREEGFDRSTSLESSDCESLDSSNSGFGPEEDTAYLDGVSLPDFELLSDPEDEHLCANLMQLLQESLAQARLGSRRPARLLMPSQLVSQVGKELLRLAYSEPCGLRGALLDVCVEQGKSCHSVGQLALDPSLVPTFQLTLVLRLDSRLWPKIQGLFSSANSPFLPGFSQSLTLSTGFRVIKKKLYSSEQLLIEEC

SEQ ID NO: 1178 - protein, 111 aa, Homo sapiens
  misc_feature (1)...(111): Xaa = any amino acid or nothing
GFFFSFLNFFIFSETEICSYAQARVKWRDLGLLQPPPPRFKRFSCLSLRSSWDYRRPPPRPANFCIFSRDGVLLCWPGWSQTPDLKXSTCLGLPKCXDNRCEPPCPAEDFS

SEQ ID NO: 1179 - protein, 829 aa, Homo sapiens
CLSISLRSLSAPAWENTAAVLGLLLSSRRRGPAAPACAVRSVSDGPDPGYRPLARCSPAQTRPWQWRLAIRTDPTWAEVARAPRHEPVTKLGAEREAAVAEECEEEAVCVIMCASVKYNIRGPALIPRMKTKHRIYYITLFSIVLLGLIATGMFQFWPHSIESSNDWNVEKRSIRDVPVVRLPADSPIPERGDLSCRMHTCFDVYRCGFNPKNKIKVYIYALKKYVDDFGVSVSNTISREYNELLMAISDSDYYTDDINRACLFVPSIDVLNQNTLRIKETAQAMAQLSRWDRGTNHLLFNMLPGGPPDYNTALDVPRDRALLAGGGFSTWTYRQGYDVSIPVYSPLSAEVDLPEKGPGPRQYFLLSSQVGLHPEYREDLEALQVKHGESVLVLDKCTNLSEGVLSVRKRCHKHQVFDYPQVLQEATFCVVLRGARLGQAVLSDVLQAGCVPVVIADSYILPFSEVLDWKRASVVVPEEKMSDVYSILQSIPQRQIEEMQRQARWFWEAYFQSIKAIALATLQIINDRIYPYAAISYEEWNDPPAVKWGSVSNPLFLPLIPPQSQGFTAIVLTYDRVESLFRVITEVSKVPSLSKLLVVWNNQNKNPPEDSLWPKIRVPLKVVRTAENKLSNRFFPYDEIETEAVLAIDDDIIMLTSDELQFGYEVWREFPDRLVGYPGRLHLWDHEMNKWKYESEWTNEVSMVLTGAAFYHKYFNYLYTYKMPGDIKNWVDAHMNCEDIAMNFLVANVTGKAVIKVTPRKKFKCPECTAIDGLSLDQTHMVERSECINKFASVFGTMPLKVVEHRADPVLYKDDFPEKLKSFPNIGSL

SEQ ID NO: 1180 - protein, 410 aa, Homo sapiens
PVGARQRGGQVACVLRPRGKMNGTRNWCTLVDVHPEDQAAGSVDILRLTLQGELTGDELEHIAQKAGRKTYAMVSSHSAGHSLASELVESHDGHEEIIKVYLKGRSGDKMIHEKNINQLKSEVQYIQEARNCLQKLREDISSKLDRNLGDSLHRQEIQVVLEKPNGFSQSPTALYSSPPEVDTCINEDVESLRKTVQDLLAKLQEAKRQHQSDCVAFEVTLSRYQREAEQSNVALQREEDRVEQKEAEVGELQRRLLGMETEHQALLAKVREGEVALEELRSNNADCQAEREKAATLEKEVAGLREKIHHLDDMLKSQQRKVRQMIEQLQNSKAVIQSKDATIQELKEKIAYLEAENLEMHDRMEHLIEKQISHGNFSTQARAKTENPGSIRISKPPSPKPMPVIRVVET

SEQ ID NO: 1181 - protein, 43 aa, Homo sapiens
MTSGSEECVFVSVYLRDLAHACGSSLLVSVRGGITEEEGGKKK

SEQ ID NO: 1182 - protein, 1874 aa, Homo sapiens
SGAVPAECAARAVTRAPVRPRAPPSAPVRPGPRPAGMDVHTRWKARSALRPGAPLLPPLLLLLLWAPPPSRAAQPADLLKVLDFHNLPDGITKTTGFCATRRSSKGPDVAYRVTKDAQLSAPTKQLYPASAFPEDFSILTTVKAKKGSQAFLVSIYNEQGIQQIGLELGRSPVFLYEDHTGKPGPEDYPLFRGINLSDGKWHRIALSVHKKNVTLILDCKKKTTKFLDRSDHPMIDINGIIVFGTRILDEEVFEGDIQQLLFVSDHRAAYDYCEHYSPDCDTAVPDTPQSQDPNPDEYYTEGDGEGETYYYEYPYYEDPEDLGKEPTPSKKPVEAAKETTEVPEELTPTPTEAAPMPETSEGAGKEEDVGIGDYDYVPSEDYYTPSPYDDLTYGEGEENPDQPTDPGAGAEIPTSTADTSNSSNPAPPPGEGADDLEGEFTEETIRNLDENYYDPYYDPTSSPSEIGPGMPANQDTIYEGIGGPRGEKGQKGEPAIIEPGMLIEGPPGPEGPAGLPGPPGTMGPTGQVGDPGERGPPGRPGLPGADGLPGPPGTMLMLPFRFGGGGDAGSKGPMVSAQESQAQAILQQARLALRGPAGPMGLTGRPGPVGPPGSGGLKGEPGDVGPQGPRGVQGPPGPAGKPGRRGRAGSDGARGMPGQTGPKGDRGFDGLAGLPGEKGHRGDPGPSGPPGPPGDDGERGDDGEVGPRGLPGEPGPRGLLGPKGPPGPPGPPGVTGMDGQPGPKGNVGPQGEPGPPGQQGNPGAQGLPGPQGAIGPPGEKGPLGKPGLPGMPGADGPPGHPGKEGPPGEKGGQGPPGPQGPIGYPGPRGVKGADGIRGLKGTKGEKGEDGFPGFKGDMGIKGDRGEIGPPGPRGEDGPEGPKGRGGPNGDPGPLGPPGEKGKLGVPGLPGYPGRQGPKGSIGFPGFPGANGEKGGRGTPGKPGPRGQRGPTGPRGERGPRGITGKPGPKGNSGGDGPAGPPGERGPNGPQGPTGFPGPKGPPGPPGKDGLPGHPGQRGETGFQGKTGPPGPPGVVGPQGPTGETGPMGERGHPGPPGPPGEQGLPGLAGKEGTKGDPGPAGLPGKDGPPGLRGFPGDRGLPGPVGALGLKGNEGPPGPPGPAGSPGERGPAGAAGPIGIPGRPGPQGPPGPAGEKGAPGEKGPQGPAGRDGLQGPVGLPGPAGPVGPPGEDGDKGEIGEPGQKGSKGDKGEQGPPGPTGPQGPIGQPGPSGADGEPGPRGQQGLFGQKGDEGPRGFPGPPGPVGLQGLPGPPGEKGETGDVGQMGPPGPPGPRGPSGAPGADGPQGPPGGIGNPGAVGEKGEPGEAGEPGPSGRSGPPGPKGERGEKGESGPSGAAGPPGPKGPPGDDGPKGSPGPVGFPGDPGPPGEPGPAGQDGPPGDKGDDGEPGQTGSPGPTGEPGPSGPPGKRGPPGPAGPEGRQGEKGAKGEAGLEGPPGKTGPIGPQGAPGKPGPDGLRGIPGPVGEQGLPGSPGPDGPPGPMGPPGLPGLKGDSGPKGEKGHPGLIGLIGPPGEQGEKGDRGLPGPQGSSGPKGEQGITGPSGPIGPPGPPGLPGPPGPKGAKGSSGPTGPKGEAGHPGPPGPPGPPGEVIQPLPIQASRTRRNIDASQLLDDGNGENYVDYADGMEEIFGSLNSLKLEIEQMKRPLGTQQNPARTCKDLQLCHPDFPDGEYWVDPNQGCSRDSFKVYCNFTAGGSTCVFPDKKSEGARITSWPKENPGSWFSEFKRGKLLSYVDAEGNPVGVVQMTFLRLLSASAHQNVTYHCYQSVAWQDAATGSYDKALRFLGSNDEEMSYDNNPYIRALVDGCATKKGYQKTVLEIDTPKVEQVPIVDIMFNDFGEASQKFGFEVGPACFMG

SEQ ID NO: 1183 - protein, 336 aa, Homo sapiens
EDSEMAPPAPGPASGGSGEVDELFDVKNAFYIGSYQQCINEAQRVKLSSPERDVERDVFLYRAYLAQRKFGVVLDEIKPSSAPELQAVRMFADYLAHESRRDSIVAELDREMSRSVDVTNTTFLLMAASIYLHDQNPDAALRALHQGDSLELVSSPGRALHLEAQPWSASPDGRTAMTVQILLKLDRLDLARKELKRMQDLDEDATLTQLATAWVSLATGGEKLQDAYYIFQEMADKCSPTLLLLNGQAACHMAQGRWEAAEGPGCREALDKDSGYPETLVNLIVLSQHLGQAPLRVTNRYLSQLKDAHRSHPFIKEYQAKENDFDRLVLQYAPSA

SEQ ID NO: 1184 - protein, 80 aa, Homo sapiens
LKKCRQTCYPKLGFLMTTTSKHAAYCLKGSCLTQARVQWPLKLTTASNFWAQVILSLPVVFVDCLMESHGTRRLKQCLQF

SEQ ID NO: 1185 - protein, 457 aa, Homo sapiens
ADPHTTVIRFFPAASATKRVLPPVLRVSSPRTWNPNVPESPRIPAPRLPKRMSGAPTAGAALMLCAATAVLLSAQGGPVQSKSPRFASWDEMNVLAHGLLQLGQGLREHAERTRSQLSALERRLSACGSACQGTEGSTDLPLAPESRVDPEVLHSLQTQLKAQNSRIQQLFHKVAQQQRHLEKQHLRIQHLQSQFGLLDHKHLDHEVAKPARRKRLPEMAQPVDPAHNVSRLHRLPRDCQELFQVGERQSGLFEIQPQGSPPFLVNCKMTSDGGWTVIQRRHDGSVDFNRPWEAYKAGFGDPHGEFWLGLEKVHSITGDRNSRLAVQLRDWDGNAELLQFSVHLGGEDTAYSLQLTAPVAGQLGATTVPPSGLSVPFSTWDQDHDLRRDKNCAKSLSGGWWFGTCSHSNLNGQYFRSIPQQRQKLKKGIFWKTWRGRYYPLQATTMLIQPMAAEAAS

SEQ ID NO: 1186 - protein, 239 aa, Homo sapiens
RCWGAPHCPDRLRSPRGGAWMVCRQLRPSSCPVAVPVIRVCLSRGLREWARCGRSPAWGGVCVCARTPAIKAAGLRGCSLLVFTGGGPVGTHGRESGSHVVRSPLCSGDPRRSCSTAQKPLPTGSGPPDTDPTGRPGSQRTQAGAPHHLTVSRIQAVCPGATSHQLWSVQGERGGLLGAWRGEGLLQSRERGCSLGDVGGHGCGGGRRRTLRGVVGGGGSRVREQVESLEGQDQDAAGL

SEQ ID NO: 1187 - protein, 394 aa, Homo sapiens
GAQRVGGAREPVAGAVRAGGSAAGGSMSVAGLKKQFYKASQLVSEKVGGAEGTKLDDDFKEMEKKVDVTSKAVTEVLARTIEYLQPNPASRAKLTMLNTVSKIRGQVKNPGYPQSEGLLGECMIRHGKELGGESNFGDALLDAGESMKRLAEVKDSLDIEVKQNFIDPLQNLCEKDLKEIQHHLKKLEGRRLDFDYKKKRQGKIPDEELRQALEKFEESKEVAETSMHNLLETDIEQVSQLSALVDAQLDYHRQAVQILDELAEKLKRRMREASSRPKREYKPKPREPFDLGEPEQSNGGFPCTTAPKIAASSSFRSSDKPIRTPSRSMPPLDQPSCKALYDFEPENDGELGFHEGDVITLTNQIDENWYEGMLDGQSGFFPLSYVEVLVPLPQ

SEQ ID NO: 1188 - protein, 930 aa, Homo sapiens
HEETKQRPSASGLWNLALAQLAAEMTAVHAGNINFKWDPKSLEIRTLAVERLLEPLVTQVTTLVNTNSKGPSNKKRGRSKKAHVLAASVEQATENFLEKGDKIAKESQFLKEELVAAVEDVRKQGDLMKAAAGEFADDPCSSVKRGNMVRAARALLSAVTRLLILADMADVYKLLVQLKVVEDGILKLRNAGNEQDLGIQYKALKPEVDKLNIMAAKRQQELKDVGHRDQMAAARGILQKNVPILYTASQACLQHPDVAAYKANRDLIYKQLQQAVTGISNAAQATASDDASQHQGGGGGELAYALNNFDKQIIVDPLSFSEERFRPSLEERLESIISGAALMADSSCTRDDRRERIVAECNAVRQALQDLLSEYMGNAGRKERSDALNSAIDKMTKKTRDLRRQLRKAVMDHVSDSFLETNVPLLVLIEAAKNGNEKEVKEYAQVFREHANKLIEVANLACSISNNEEGVKLVRMSASQLEALCPQVINAALALAAKPQSKLAQENMDLFKEQWEKQVRVLTDAVDDITSIDDFLAVSENHILEDVNKCVIALQEKDVDGLDRTAGAIRGRAARVIHVVTSEMDNYEPGVYTEKVLEATKLLSNTVMPRFTEQVEAAVEALSSDPAQPMDENEFIDASRLVYDGIRDIRKAVLMIRTPEELDDSDFETEDFDVRSRTSVQTEDDQLIAGQSARAIMAQLPQEQKAKIAEQVASFQEEKSKLDAEVSKWDDSGNDIIVLAKQMCMIMMEMTDFTRGKGPLKNTSDVISAAKKIAEAGSRMDKLGRTIADHCPDSACKQDLLAYLQRIALYCHQLNICSKVKAEVQNLGGELVVSGVDSAMSLIQAAKNLMNAVVQTVKASYVASTKYQKSQGMASLNLPAVSWKMKAPEKKPLVKREKQDETQTKIKRASQKKHVNPVQALSEFKAMDSI

SEQ ID NO: 1189 - protein, 145 aa, Homo sapiens
  misc_feature (1)...(145): Xaa = any amino acid or nothing
DTFRNSRVDDFVRLGTDESKINAALCSRSRAHLVAGFNEYQRMTGRDIEKSICREMSGDLEEGMLAVKKCLKNTPAFFAVRLNKAMXWAGTKERTLIRIMVSRSEIDLLDIRSEYKRMYGKSLYHDISGDTSGDYRXSLLKICRG

SEQ ID NO: 1190 - protein, 314 aa, Homo sapiens
NACLPSSVLSAAAARGASTNEPSTGRMERPQPDSMPQDLSEALKEATKEVHTQAENAEFMRNFQKGQVTRDGFKLVMASLYHIYVALEEEIERNKESPVFAPVYFPEELHRKAALEQDLAFWYGPRWQEVIPYTPAMQRYVKRLHEVGRTEPELLVAHAYTRYLGDLSGGQVLKKIAQKALDLPSSGEGLAFFTFPNIASATKFKQLYRSRMNSLEMTPAVRQRVIEEAKTAFLLNIQLFEELQELLTHDTKDQSPSRAPGLRQRASNKVQDSAPVETPRGKPPLNTRSQAPLLRWVLTLSFLVATVAVGLYAM

SEQ ID NO: 1191 - protein, 106 aa, Homo sapiens [sequence omitted]

SEQ ID NO: 1192 - protein, 321 aa, Homo sapiens
APSMAGLKRRASQVWPEEHGEQEHGLYSLHRMFDIVGTHLTHRDVRVLSFLFVDVIDDHERGLIRNGRDFLLALERQGRCDESNFRQVLQLLRIITRHDLLPYVTLKRRRAVCPDLVDKYLEETSIRYVTPRALSDPEPRPPQPSKTVPPHYPVVCCPTSGPQMCSKRPARGRATLGSQRKRRKSVTPDPKEKQTCDIRLRVRAEYCQHETALQGNVFSNKQDPLERQFERFNQANTILKSRDLGSIICDIKFSELTYLDAFWRDYINGSLLEALKGVFITDSLKQAVGHEAIKLLVNVDEEDYELGRQKLLRNLMLQALP

SEQ ID NO: 1193 - protein, 252 aa, Homo sapiens
SSASTNMSRGSSAGFDRHITIFSPEGRLYQVEYAFKAINQGGLTSVAVRGKDCAVIVTQKKVPDKLLDSSTVTHLFKITENIGCVMTGMTADSRSQVQRARYEAANWKYKYGYEIPVDMLCKRIADISQVYTQNAEMRPLGCCMILIGIDEEQGPQVYKCDPAGYYCGFKATAAGVKQTESTSFLEKKVKKKFDWTFEQTVETAITCLSTVLSIDFKPSEIEVGVVTVENPKFRILTEAEIDAHLVALAERD

SEQ ID NO: 1194 - protein, 394 aa, Homo sapiens
RCSKSLRMSTFFSDTAWICLAVPTVLCGTVFCKYKKSSGQLWSWMVCLAGLCAVCLLILSPFWGLILFSVSCFLMYTYLSGQELLPVDQKAVLVTGGDCGLGHALCKYLDELGFTVFAGVLNENGPGAEELRRTCSPRLSVLQMDITKPVQIKDAYSKVAAMLQDRGLWAVINNAGVLGFPTDGELLLMTDYKQCMAVNFFGTVEVTKTFLPLLRKSKGRLVNVSSMGGGAPMERLASYGSSKAAVTMFSSVMRLELSKWGIKVASIQPGGFLTNIAGTSDKWEKLEKDILDHLPAEVQEDYGQDYILAQRNFLLLINSLASKDFSPVLRDIQHAILAKSPFAYYTPGKGAYLWICLAHYLPIGIYDYFAKRHFGQDKPMPRALRMPNYKKKAT

SEQ ID NO: 1195 - protein, 129 aa, Homo sapiens
AACLALRIAAAMASQSQGIQQLLQAEKRAAEKVSEARKRKNRRLKQAKEEAQAEIEQYRLQREKEFKAKEAAALGSRGSCSTEVEKETQEKMTILQTYFRQNRDEVLDNLLAFVCDIRPEIHENYRING

SEQ ID NO: 1196 - protein, 218 aa, Homo sapiens
ESAWGCTCYSLPPGRSPARARDPCPCPRLSIKLLTCCRPASPKGCARRPRSLAIASRGCPCASRAGGVRGAGSRLRAMAPKVFRQYWDIPDGTDCHRKAYSTTSIASVAGLTAAAYRVTLNPPGTFLEGVAKVGQYTFTAAAVGAVFGLTTCISAHVREKPDDPLNYFLGGCAGGLTLGARTHNYGIGAAACVYFGIAASLVKMGRLEGWEVFAKPKV

SEQ ID NO: 1197 - protein, 687 aa, Homo sapiens
VAAAYPPPASPPWSPARSLAGAAPAPLCVGPAAVEAREGDAAGDERIAGELAARGPREAVSRCFSPSRRPALGFEIMSIHIVALGNEGDTFHQDNRPSGLIRTYLGRSPLVSGDESSLLLNAASTVARPVFTEYQASAFGNVKLVVHDCPVWDIFDSDWYTSRNLIGGADIIVIKYNVNDKFSFHEVKDNYIPVIKRALNSVPVIIAAVGTRQNEELPCTCPLCTSDRGSCVSTTEGIQLAKELGATYLELHSLDDFYIGKYFGGVLEYFMIQALNQKTSEKMKKRKMSNSFHGIRPPQLEQPEKMPVLKAEASHYNSDLNNLLFCCQCVDVVFYNPDLKKVVEAHKIVLCAVSHVFMLLFNVKSPTDIQDSSIIRTTQDLFAINRDTAFPGASHESSGNPPLRVIVKDALFCSCLSDILRFIYSGAFQWEELEEDIRKKLKDSGDVSNVIEKVKCILKTPGKINCLRNCKTYQARKPLWFYNTSLKFFLNKPMLADVVFEIQGTTVPAHRAILVARCEVMAAMFNGNYMEAKSVLIPVYGVSKETFLSFLEYLYTDSCCPAGIFQAMCLLICAEMYQVSRLQHICELFIITQLQSMPSRELASMNLDIVDLLKKAKFHHSDCLSTWLLHFIATNYLIFSQKPEFQDLSVEERSFVEKHRWPSNMYLKQLAEYRKYIHSRKCRCLVM

SEQ ID NO: 1198 - protein, 354 aa, Homo sapiens
DIGWITGHSYVVYGPLCNGATSVLFESTPVYPNAGRYWETVERLKINQFYGAPTAVRLLLKYGDAWVKKYDRSSLRTLGSVGEPINCEAWEWLHRVVGDSRCTLVDTWWQTETGGICIAPRPSEEGAEILPAMAMRPFFGIVPVLMDEKGSVVEGSNVSGALCISQAWPGMARTIYGDHQRFVDAYFKAYPGYYFTGDGAYRTEGGYYQITGRMDDVINISGHRLGTAEIEDAIADHPAVPESAVIGYPHDIKGEAAFAFIVVKDSAGDSDVVVQELKSMVATKIAKYAVPDEILVVKRLPKTRSGKVMRRLLRKIITSEAQELGDTTTLEDPSIIAEILSVYQKCKDKQAAAK

SEQ ID NO: 1199 - protein, 232 aa, Homo sapiens
GIIIQGRARNHKKTWGRVFLTGEKANSILKRYPRANGFFEEIRQGNIERECKEEFCTFEEAREAFENNEKTKEFWSTYTKAQQGESNRGSDWFQFYLTFPLIFGLFIILLVIFLIWRCFLRNKTRRQTVTEGHIPFPQHLNIITPPPPPDEVFDSSGLSPGFLGYVVGRSDSVSTRLSNCDPPPTYEEATGQVNLQRSETEPHLDPPPEYEDIVNSNSASAIPMVPVVTTIK

SEQ ID NO: 1200 - protein, 303 aa, Homo sapiens
KNPAKMSLYPSLEDLKVDKVIQAQTAFSANPANPAILSEASAPIPHDGNLYPRLYPELSQYMGLSLNEEEIRANVAVVSGAPLQGQLVARPSSINYMVAPVTGNDVGIRRAEIKQGIREVILCKDQDGKIGLRLKSIDNGIFVQLVQANSPASLVGLRFGDQVLQINGENCAGWSSDKAHKVLKQAFGEKITMTIRDRPFERTITMHKDSTGHVGFIFKNGKITSIVKDSSAARNGLLTEHNICEINGQNVIGLKDSQIADILSTSGTVVTITIMPAFIFEHIIKRMAPSIMKSLMDHTIPEV

SEQ ID NO: 1201 - protein, 990 aa, Homo sapiens
GGAMELRVLLCWASLAAALEETLLNTKLETADLKWVTFPQVDGQWEELSGLDEEQHSVRTYEVCEVQRAPGQAHWLRTGWVPRRGAVHVYATLRFTMLECLSLPRAGRSCKETFTVFYYESDADTATALTPAWMENPYIKVDTVAAEHLTRKRPGAEATGKVNVKTLRLGPLSKAGFYLAFQDQGACMALLSLHLFYKKCAQLTVNLTRFPETVPRELVVPVAGSCVVDAVPAPGPSPSLYCREDGQWAEQPVTGCSCAPGFEAAEGNTKCRACAQGTFKPLSGEGSCQPCPANSHSNTIGSAVCQCRVGYFRARTDPRGAPCTTPPSAPRSVVSRLNGSSLHLEWSAPLESGGREDLTYALRCRECRPGGSCAPCGGDLTFDPGPRDLVEPWVVVRGLRPDFTYTFEVTALNGVSSLATGPVPFEPVNVTTDREVPPAVSDIRVTRSSPSSLSLAWAVPRAPSGAWLDYEVKYHEKGAEGPSSVRFLKTSENRAELRGLKRGASYLVQVRARSEAGYGPFGQEHHSQTQLDESEGWREQLALIAGTAVVGVVLVLVVIVVAVLCLRKQSNGREAEYSDKHGQYLIGHGTKVYIDPFTYEDPNEAVREFAKEIDVSYVKIEEVIGAGEFGEVCRGRLKAPGKKESCVAIKTLKGGYTERQRREFLSEASIMGQFEHPNIIRLEGVVTNSMPVMILTEFMENGALDSFLRLNDGQFTVIQLVGMLRGIASGMRYLAEMSYVHRDLAARNILVNSNLVCKVSDFGLSRFLEENSSDPTYTSSLGGKIPIRWTAPEAIAFRKFTSASDAWSYGIVMWEVMSFGERPYWDMSNQDVINAIEQDYRLPPPPDCPTSLHQLMLDCWQKDRNARPRFPQVVSALDKMIRNPASLKIVARENGGASHPLLDQRQPHYSAFGSVGEWLRAIKMGRYEESFAAAGFGSFELVSQISAEDLLRIGVTLAGHQKKILASVQHMKSQAKPGTPGGTGGPAPQY

SEQ ID NO: 1202 - protein, 1075 aa, Homo sapiens
ERSWESREKGPPVAPPLPRTRSPAAAARLPRSPRPLPLSPSDRIKALSEALPAGRPCGGDRSATDTHGPLAPSRLPSARQLPSAEAAPRRPQPARGPHSPPLGTPGPGAAWRRPHSGIMAQVAMSTLPVEDEESSESRMVVTFLMSALESMCKELAKSKAEVACIAVYETDVFVVGTERGRAFVNTRKDFQKDFVKYCVEEEEKAAEMHKMKSTTQANRMSVDAVEIETLRKTVEDYFCFCYGKALGKSTVVPVPYEKMLRDQSAVVVQGLPEGVAFKHPENYDLATLKWILENKAGISFIIKRPFLEPKKHVGGRVMVTDADRSILSPGGSCGPIKVKTEPTEDSGISLEMAAVTVKEESEDPDYYQYNIQGSHHSSEGNEGTEMEVPAEDDDYSPPSKRPKANELPQPPVPEPANAGKRKVREFNFEKWNARITDLRKQVEELFERKYAQAIKAKGPVTIPYPLFQSHVEDLYVEGLPEGIPFRRPSTYGIPRLERILLAKERIRFVIKKHELLNSTREDLQLDKPASGVKEEWYARITKLRKMVDQLFCKKFAERLGSTEAKAVPYQKFEAHPNDLYVEGLPENIPFRSPSWYGIPRLEKIIQVGNRIKFVIKRPELLTHSTTEVTQPRTNTPVKEDWNVRITKLRKQVEEIFNLKFAQALGLTEAVKVPYPVFESNPEFLYVEGLPEGIPFRSPTWFGIPRLERIVRGSNKIKFVVKKPELVISYLPPGMASKINTKALQSPKRPRSPGSNSKVPEIEVTVEGPNNNNPQTSAVRTPTQTNGSNVPFKPRGREFSFEAWNAKITDLKQKVENLFNEKCGEALGLKQAVKVPFALFESFPEDFYVEGLPEGVPFRRPSTFGIPRLEKILRNKAKIKFIIKKPEMFETAIKESTSSKSPPRKINSSPNVNTTASGVEDLNIIQVTIPDDDNERLSKVEKARQLREQVNDLFSRKFGEAIGMGFPVKVPYRKITINPGCVVVDGMPPGVSFKAPSYLEISSMRRILDSAEFIKFTVIRPFPGLVINNQLVDQSESKGPVIQESAEPSQLEVPATEEIKETDGSSQIKQEPDPTW

SEQ ID NO: 1203 - protein, 273 aa, Homo sapiens
CVLSLGTPVGETMALNKNHSEGGGVIVNNTESILMSYDHVELTFNDMKNVPEAFKGTKKGTVYLTPYRVIFLSKGKDAMQSFMMPFYLMKDCEIKQPVFGANYIKGTVKAEAGGGWEGSASYKLTFTAGGAIEFGQRMLQVASQASRGEVPSGAYGYSYMPSGAYVYPPPVANGMYPCPPGYPYPPPPPEFYPGPPMMDGAMGYVQPPPPPYPGPMEPPVSGPDVPSTPAAEAKAAEAAASAYYNPGNPHNVYMPTSQPPPPPYYPPEDKKTQ

SEQ ID NO: 1204 - protein, 1637 aa, Homo sapiens
QLRGESDRSKQPPPASSPTKRKGRSRALEAVPAPPASGPRAPAKESPPKRVPDPSPVTKGTAAESGEEAARAIPRELPVKSSSLLPEIKPEHKRGPLPNHFNGRAEGGRSRELGRAAGAPGASDADGLKPRNHFGVGRSTVTTKVTLPAKPKHVELNLKTPKNLDSLGNEHNPFSQPVHKGNTATKISLFENKRTNSSPRHTDIRGPRNTPASSKTFVGRAKLNLAKKAKEMEQPEKKVMPNSPQNGVLVKETAIETKVTVSEEEILPATRGMNGDSSENQALGPQPNQDDKADVQTDAGCLSEPVASALIPVKDHKLLEKEDSEAADSKSLVLENVTDTAQDIPTTVDTKDLPPTAMPKPQHTFSDSQSPAESSPGPSLSLSAPAPGDVPKDTCVQSPISSFPCTDLKVSENHKGCVLPVSRQNNEKMPLLELGGETTPPLSTERSPEAVGSECPSRVLVQVRSFVLPVESTQDVSSQVIPESSEVREVQLPTCHSNEPEVVSVASCAPPQEEVLGNEHSHCTAELAAKSGPQVIPPASEKTLPIQAQSQGSRTPLMAESSPTNSPSSGNHLATPQRPDQTVTNGQDSPASLLNISAGSDDSVFDSSSDMEKFTEIIKQMDSAVCMPMKRKKARMPNSPAPHFAMPPIHEDHLEKVFDPKVFTFGLGKKKESQPEMSPALHLMQNLDTKSKLRPKRASAEQSVLFKSLHTNTNGNSEPLVMPEINDKENRDVTNGGIKRSRLEKSALFSSLLSSLPQDKIFSPSVTSVNTMTTAFSTSQNGSLSQSSVSQPTTEGAPPCGLNKEQSNLLPDNSLKVFNFNSSSTSHSSLKSPSHMEKYPQKEKTKEDLDSRSNLHLPETKFSELSKLKNDDMEKANHIESVIKSNLPNCANSDTDFMGLFKSSRYDPSISFSGMSLSDTMTLRGSVQNKLNPRPGKVVIYSEPDVSEKCIEVFSDIQDCSSWSLSPVILIKVVRGCWILYEQPNFEGHSIPLEEGELELSGLWGIEDILERHEEAESDKPVVIGSIRHVVQDYRVSHIDLFTEPEGLGILSSYFDDTEEMQGFGVMQKTCSMKVHWGTWLIYEEPGFQGVPFILEPGEYPDLSFWDTEAAYIGSMRPLKMGGRKVEFPTDPKVVVYEKPFFEGKCVELETGMCSFVMEGGETEEATGDDHLPFTSVGSMKVLRGIWVAYEKPGFTGHQYLLEEGEYRDWKAWGGYNGELQSLRPILGDFSNAHMIMYSEKNFGSKGSSIDVLGIVANLKETGYGVKTQSINVLSGVWVAYENPDFTGEQYILDKGFYTSFEDWGGKNYKISSVQPICLDSFTGPRRRNQIHLFSEPQFQGHSQSFEETTSQIDDSFSTKSCRVSGGSWVVYDGENFTGNQYVLEEGHYPCLSAMGCPPGATFKSLRFIDVEFSEPTIILFEREDFKGKKIELNAETVNLRSLGFNTQIRSVQVIGGIWVTYEYGSYRGRQFLLSPAEVPNWYEFSGCRQIGSLRPFVQKRIYFRLRNKATGLFMSTNGNLEDLKLLRIQVMEDVGADDQIWIYQEGCIKCRIAEDCCLTIVGSLVTSGSKLGLALDQNADSQFWSLKSDGRIYSKLKPNLVLDIKGGTQYDQNHIILNTVSKEKFTQVWEAMVLYT

SEQ ID NO: 1205 - protein, 143 aa, Homo sapiens
RSVIPGSTLSLHDSQTSFCFSDSIPTPSNMEETQQKYNLELLRISLLLIEALLEPVRVLRSMVANNLEYDTSDRDDYHLLQDLEGGIQTLMGSLVDGSRRTVQILKQTYSKIDTNSHNHDALLENYGLLYCFRKDMDYGETFL

SEQ ID NO: 1206 - protein, 156 aa, Homo sapiens
KGEAAAFSATFPIARQEFLSVTTIAVMSGRGKQGGKARAKAKSRSSRAGLQFPVGRVHRLLRKGNYAERVGAGAPVYMAAVLEYLTAEILELAGNAARDNKKTRIIPRHLQLAIRNDEELNKLLGKVTIAQGGVLPNIQAVLLPKKTESHHKAKGK

SEQ ID NO: 1207 - protein, 605 aa, Homo sapiens
RCYLQFLALLLTSTSARAAAAIAAAEEPAGSPSVMTRAGDHNRQRGCCGSLADYLTSAKFLLYLGHSLSTWGDRMWHFAVSVFLVELYGNSLLLTAVYGLVVAGSVLVLGAIIGDWVDKNARLKVAQTSLVVQNVSVILCGIILMMVFLHKHELLTMYHGWVLTSCYILIITIANIANLASTATAITIQRDWIVVVAGEDRSKLANMNATIRRIDQLTNILAPMAVGQIMTFGSPVIGCGFISGWNLVSMCVEYVLLWKVYQKTPALAVKAGLKEEETELKQLNLHKDTEPKPLEGTHLMGVKDSNIHELEHEQEPTCASQMAEPFRTFRDGWVSYYNQPVFLAGMGLAFLYMTVLGFDCITTGYAYTQGLSGSILSILMGASAITGIMGTVAFTWLRRKCGLVRTGLISGLAQLSCLILCVISVFMPGSPLDLSVSPFEDIRSRFIQGESITPTKIPEITTEIYMSNGSNSANIVPETSPESVPIISVSLLFAGVIAARIGLWSFDLTVTQLLQENVIESERGIINGVQNSMNYLLDLLHFIMVILAPNPEAFGLLVLISVSFVAMGHIMYFRFAQNTLGNKLFACGPDAKEVRKENQANTSVV

SEQ ID NO: 1208 - protein, 199 aa, Homo sapiens
IRHEASDSWCACPGTSSWTQSWLGLPLGLVRGCRAGTTPLPPPATPGHFEQWRPCPLTRLGRGLSVQGLVASNLNLKPGECLRVRGEVAPDAKSFVLNLGKDSNNLCLHFNPRFNAHGDANTIVCNSKDGGAWGTEQREAVFPFQPGSVAEVCITFDQANLTVKLPDGYEFKFPNRLNLEAINYMAADGDFKIKCVAFD

SEQ ID NO: 1209 - protein, 1189 aa, Homo sapiens
  misc_feature (1)...(1189): Xaa = any amino acid or nothing
PLKTDEARAPGPRLPAPTAITASEPRVTLLVAGKLISFLIDSGATYSALPEFSGPTHPSQVSVVGVDGLISCPLATRPLTCSLFDAIFSHSFLIMPHCPTPILGXDLLAKVKASITFSCPLQPESPPAPPASPAPDPFPQYPLPASLINPSVAAHHDPIRIQLKDSSKFPSVPQYPISLTHQKGLQPIVNKLCSCSLLRPTHSPYNTPILPVKKSDGSYRLVHNLQAISQAVLPIHPIVHNPYPLLSLVATNTTLYTAIDLKDAFFTISLHPDSQNLFAFTWTDPDTLQSQQLTWTVLPQGFRDSPSLDEALARNLTSLNLSPSHLQYVDDLLLCSPSLKDSQTHTATALLNFLAIKGYRVSPSKAQLSISMMTYLGIQLSPGAQAMTPARAALIENLPPPSSKSEILSFPGLAGFFRIWISNFALLAHPLYEVAKGPPNEPLNPSHNILPSFHKLQTALVTASAPSLPDISQPFTLYTAESXGIALGVLGQQKGNPPSFAPVAYLSKQLDNTVKGWPACFKALEVVASLALESRKLTFSQNTTVHSSHNLQDLLSSQAVSSLPPSRIQLLHALFIKNPKFSLTRSASLNPASLLPVSSSLPTHSSTDILDHVQPHFPNTSSEPLTNPNDQLFIDGSSFQAHQLPPRLLDMQLFPLTKXLKPGSSSQKAELIALTRALNLSKGKRVNIYTDSKYAYHIPRSHAAIWQKRGLLTAKGTPITNGHLIYXLLQATHLPAKAGVIHCXGHRTGSDEISKGNRKTDEAAKQDSLSPLPAPILLVTPAVPPRYPPTEKSSLLQQGASLQGDWIIKNQKPVLPQEQSKEILTPLHQPFHISACPLYLLLRPCFSSPHLFISLKDITSNCRICSVTSSQGALCPLLILTYQLRGTLPGEHWQVNFTHMPPVKKSKYLLTLVDTFSGXVEAFPTPSEKAAEVSQILVTEIIPRFGLPGSIQSDNSPSFISQITQQVSQSLGIQWRLHIPCWPQTSGKVERANGILKAQLTKLTLEVQKPWTSLLPIALESIRASPKAPSFLSPFELIYGRPFLLQNRPPSNSQLGEYLPTVSLMSYLLCQQADQALPKPHEGVSNPKXTCSPIPKDSLSRVTLQNHRGLDLLTAEKGGLCIFLEEECCFYTNQSGLVQDAAGRINEKASGRVQWLTPVIPDLWEAEAGGSRGQEIETILANTVKPRLY

SEQ ID NO: 1210 - protein, 133 aa, Homo sapiens
SVVELPFTMKALMLLTLSVLLCWVSADIRCHSCYKVPVLGCVDRQSCRLEPGQQCLTTHAYLGKMWVFSNLRCGPPEEPCQEAFNQTNRKLGLTYNTTCCNKDNCNSAGPRPTPALGLVFLTSLAGLGLWLLH

SEQ ID NO: 1211 - protein, 515 aa, Homo sapiens
GTRLRPRWPRARYPVGRWSVCWVRAAGFALAMAPWLQLLSLLGLLPGAVAAPAQPRAASFQAWGPPSPELLAPTRFALEMFNRGRAAGTRAVLGLVRGRVRRAGQGSLYSLEATLEEPPCNDPMVCRLPVSKKTLLCSFQVLDELGRHVLLRKDCGPVDTKVPGAGEPKSAFTQGSAMISSLSQNHPDNRNETFSSVISLLNEDPLSQDLPVKMASIFKNFVITYNRTYESKEEARWRLSVFVNNMVRAQKIQALDRGTAQYGVTKFSDLTEEEFRTIYLNTLLRKEPGNKMKQAKSVGDLAPPEWDWRSKGAVTKVKDQGMCGSCWAFSVTGNVEGQWFLNQGTLLSLSEQELLDCDKMDKACMGGLPSNAYSAIKNLGGLETEDDYSYQGHMQSCNFSAEKAKVYINDSVELSQNEQKLAAWLAKRGPISVAINAFGMQFYRHGISRPLRPLCSPWLIDHAVLLVGYGNRSDVPFWAIKNSWGTDWGEKGYYYLHRGSGACGVNTMASSAVVD

SEQ ID NO: 1212 - protein, 121 aa, Homo sapiens
SAKIQVDDFEESERDCSSVYTFPRARGTANESASSAAMKRKTKCWNGVATWLWVANDENCGICRMAFNGCCPDCKVPGDDCPLVWGQCSHCFHMHCILKWLHAQQVQQHCPMCRQEWKFKE

SEQ ID NO: 1213 - protein, 117 aa, Homo sapiens
MATLPSGPVFHREKPLRDGSHSLKVSQQRSRTPRPLYPAWPDSGPCGPQLLFQAGQTPGSLPSLRTQLRGPSAPFYLHLSTLPQLDVWVSPAPSSLAGAKYTMVKQSVRRASLHTHT

SEQ ID NO: 1214 - protein, 139 aa, Homo sapiens
RSGIPGSTSLSTISCRYPVCGSDGTTYPSGCQLRAASQRAESRGEKAITQVSKGTCEQGPSIVTPPKDIWNVTGAQVYLSCEVIGIPTPVLIWNKVKRGHYGVQRTELLPGDRDNLAIQTRGGPEKHEVTGWVLVSPLS

SEQ ID NO: 1215 - protein, 86 aa, Homo sapiens
RSGIPGSTSLSTISSRHTNAGVRDNTSNLTHRSGDYLNYQIRTSRANIHTRMRPKTSDSPRGLTRARPDAGKKEMKTITGKTFSSR

SEQ ID NO: 1216 - protein, 143 aa, Homo sapiens
DAAVRSQFPVDDSCCVDVDECAPPAEPCGKGHRCVYSPGCFRCEMKTCYYFDGISRMCVDVNECQRYPGRLCGHKCENTLGSYLCSCSVGFRLSVDGRSCEDINECSSSPCSQECANVYGSYQCYCRRGYQLSDVDGVTCEDI

SEQ ID NO: 1217 - protein, 107 aa, Homo sapiens
ACGTVRNSRVDFAVDDFVVCPRPQSCVVDQTGSAHCVVCRAAPCPVPSSPGQELCGNNNVTYISSCHMRQATCFLGRSIGVRHAGSCAGTPEEPPGGESAEEEENFV

SEQ ID NO: 1218 - protein, 132 aa, Homo sapiens
AEFRSTSLSTISLEENFAVEAANYQDTIGRLQDEIQNMKEEMARHLREYQDLLNVKMALDIEIATYRKLLEGEESRISLPLPNFSSLNLRETNLDSLPLVDTHSKRTLLIKTVETRDGQVINETSQHHDDLE

SEQ ID NO: 1219 - protein, 1133 aa, Homo sapiens
QPGKSAVAQAPEGARPSDPAWPAGLGPGPGLPDGARGPGDAPSPGPAPPAPRPRPARPGPRLRLSPPRLGPPPPAPRPRPACAMEPGRGGTETVGKFEFSRKDLIGHGAFAVVFKGRHREKHDLEVAVKCINKKNLAKSQTLLGKEIKILKELKHENIVALYDFQEMANSVYLVMEYCNGGDLADYLHAMRTLSEDTIRLFLQQIAGAMRLLHSKGIIHRDLKPQNILLSNPAGRRANPNSIRVKIADFGFARYLQSNMMAATLCGSPMYMAPEVIMSQHYDGKADLWSIGTIVYQCLTGKAPFQASSPQDLRLFYEKNKTLVPTIPRETSAPLRQLLLALLQRNHKDRMDFDEFFHHPFLDASPSVRKSPPVPVPSYPSSGSGSSSSSSSTSHLASPPSLGEMQQLQKTLASPADTAGFLHSSRDSGGSKDSSCDTDDFVMVPAQFPGDLVAEAPSAKPPPDSLMCSGSSLVASAGLESHGRTPSPSPPCSSSPSPSGRAGPFSSSRCGASVPIPVPTQVQNYQRIERNLQSPTQFQTPRSSAIRRSGSTSPLGFARASPSPPAHAEHGGVLARKMSLGGGRPYTPSPQVGTIPERPGWSGTPSPQGAEMRGGRSPRPGSSAPEHSPRTSGLGCRLHSAPNLSDLHVVRPKLPKPPTDPLGAVFSPPQASPPQPSHGLQSCRNLRGSPKLPDFLQRNPLPPILGSPTKAVPSFDFPKTPSSQNLLALLARQGVVMTPPRNRTLPDLSEVGPFHGQPLGPGLRPGEDPKGPFGRSFSTSRLTDLLLKAAFGTQAPDPGSTESLQEKPMEIAPSAGFGGSLHPGARAGGTSSPSPVVFTVGSPPSGSTPPQGPRTRMFSAGPTGSASSSARHLVPGPCSEAPAPELPAPGHGCSFADPIAANLEGAVTFEAPDLPEETLMEQEHTEILRGLRFTLLFVQHVLEIAALKGSASEAAGGPEYQLQESVVADQISLLSREWGFAEQLVLYLKVAELLSSGLQSAIDQIRAGKLCLSSTVKQVVRRLNELYKASVVSCQGLSLRLQRFFLDKQRLLDRIHSITAERLIFSHAVQMVQSAALDEMFQHREGCVPRYHKALLLLEGLQHMLSDQADIENVTKCKLCIERRLSALLTGICA

SEQ ID NO: 1220 - protein, 68 aa, Homo sapiens
EFSELERKIICEFLQVLTHSHDPSEGICTGEFKVRAMIFDGPKVRQLQKVVEGNCLRVLEKLVRNLDG

SEQ ID NO: 1221 - protein, 76 aa, Homo sapiens
RTEFSVAVRCRDFVVPIAGRINSNLFKEDCHQKIDDLFSGKLYLIGIAAIVVAVIMIFEMILSMVLCCGIRNSSVY

SEQ ID NO: 1222 - protein, 126 aa, Homo sapiens
NFAKYFLHQSHEEREHAEKLMKLQNQRGGRIFLQDIKKPDCDDWESGLNAMECALHLEKNVNQSLLELHKLATDKNDPHLCDFIETHYLNEQVKAIKELGDHVTNLRKMGAPESGLAEYLFDKHTL

SEQ ID NO: 1223 - protein, 109 aa, Homo sapiens
GGFTRGSSGTSGDHGELVVRIASLEVENQSLRGVVQELQQAISKLEARLNVLEKSSPGHRATAPQTQHVSPMRQVEPPAKKPATPAEDDEDDDIDLFGSDNEEEDKEAA

SEQ ID NO: 1224 - protein, 133 aa, Homo sapiens
RTSLLLAFALLCLPWLQEAGAVQTVPLSRLFDHAMLQAHRAHQLAIDTYQEFEETYIPQYQKYSFLHDSQIVFCLSDSIPTPSNMEETQQQSYLELLRIFLLLHRAWMGAEAVLKSMVANKLVDYTSDSDDYH

SEQ ID NO: 1225 - protein, 146 aa, Homo sapiens
TVRNSRVDFAVDDFVGFTMIGEHSIYCTVNNDEGEWSGPPPECRGKSLTSKVPPTVQKPTTVNVPTTEVSPTSQKTTTKTTTPNAQATRSTPVSRTTKHFHETTPNKGSGTTSGTTRLLSGSRPVTQAGMRWCDRSSLQSRTPGFK

SEQ ID NO: 1226 - protein, 66 aa, Homo sapiens
  misc_feature (1)...(66): Xaa = any amino acid or nothing
GNTTFFFFFEMESRSVVQVGVQWCDLGLLQPPPPGFKQFSCLSLPSSXDYRCAPHEIVDSEVDPGL

SEQ ID NO: 1227 - protein, 104 aa, Homo sapiens
FDKYHPGYFGKVGMKHYHLKRNQSFCPTVNLDKLWTLVSEQTRVNAAKNKTGAAPIIDVVRSGYYKVLGKGKLPKQPVIVKAKFFSRRAEEKFKSPPKGRDLVA

SEQ ID NO: 1228 - protein, 66 aa, Homo sapiens
MYFLAHKEILRTLFKPSIKKQFSVSRVLSLSLSVSLSLCLSVSLSLSLSLFLSLCILFKMSWTHCQ

SEQ ID NO: 1229 - protein, 128 aa, Homo sapiens
RTEIPGSTISSQANSWSLEELCLEVNVTTSQGATLDACSFGVTGLKLQGDTCNNNKLSLSNAISTALLLTQMHWDKQTNTEKKASVVTLPVYLNFTRADLIFTVDFEIATKEDPRSFYERGVAVLCTE

SEQ ID NO: 1230 - protein, 147 aa, Homo sapiens
PFRNSRVDDFVELRNLIKQIRNFLTQDSADLDSIEAVANEVLKMEMPSTPQQLQNLTEDIRERVESLSQVEVILQHSAADIARAEMLLEEAKRASKSATDVKVTADMVKEALEEAEKAQVAAEKAIKQADEDIQGTQNLLTSIESET

SEQ ID NO: 1231 - protein, 145 aa, Homo sapiens
  misc_feature (1)...(145): Xaa = any amino acid or nothing
LVRHSSSGFADSDFGLPARRYYMMQKRPACSLKSASVQQLLDCSQEAXKSAYCPYSESYXGAALLTQEGRIFKGCNIENACYPLGICAERTAIQKAVSEGYKDFRAIAIASDMQDDFISPCGACRQVMREFGTNWPVYMTKPDGT

SEQ ID NO: 1232 - protein, 146 aa, Homo sapiens
  misc_feature (1)...(146): Xaa = any amino acid or nothing
AGASIPQRLRCRRIFGPAACCTTYDNLKGALENGHFHGIGRAFADALLLTGAKVALRDWHLEACGQSRAALXEAEXTQKTLFIQCDVADQQQLRDTFRKVVDHFGRLDILVNNAGVNNEKNWEKTLQINLVSVISGTYLGLDYMSK

SEQ ID NO: 1233 - protein, 129 aa, Homo sapiens
DSGSHCHAPPTTARRAFPIPFGSKSNMATLKDQLIYNLLKEEQTPQNKITVVGVGAVGMACAISILMKDLADELALVDVIEDKLKGEMMDLQHGSLFLRTPKIVSGKDYNVTANSKLVIITAGARQQEG

SEQ ID NO: 1234 - protein, 169 aa, Homo sapiens
  misc_feature (1)...(169): Xaa = any amino acid or nothing
SSYAFFVQTCREEHKKKHPDSSVNFAEFSKKCSERWKTMSAKEKSKFEDMAKSDKARYDREMKNYVPPKGDKKGKKKDPNAPKRPPSAFFLFCSEHRPKIKSEHPGLSIGDTAKKLDEMWSEQSGQDKQPYEQEAAYAKEEYGKDFAPILPKGKRXARKEGSGSPTSSK

SEQ ID NO: 1235 - protein, 142 aa, Homo sapiens
  misc_feature (1)...(142): Xaa = any amino acid or nothing
VPEFPGRRFRDIEERTCEQHVFFPKVNEAGEFGLILVQRKALTSKLEHKDLNISVDCSFNHGICDWKQDREDXFDWNPADRDNAIGFYMAVPALAGHKKDIGRLILLLPDLRPRSNFCLLFDYRLAEDKAGNSSVFENSTMP

SEQ ID NO: 1236 - protein, 112 aa, Homo sapiens
  misc_feature (1)...(112): Xaa = any amino acid or nothing
MHASCLNIPGSFKCSCREGWIGNGIKCIDLDECSNGTHQCSINAQCVNTPGSYRCACSEGFTGDGFTCSDVDECAENINLCENGQCLNVPGAYRCECEMXFTPASDSRSCQG

SEQ ID NO: 1237 - protein, 97 aa, Homo sapiens
RRALDFAVGEYNKASNDMYHSRALQVVRARKQIVAGVNYFLDVELGRTTCTKTQPNLDNCPFHDQPHLKRKAFCSFQIYAVPWQGTMTLSKSTCQDA

SEQ ID NO: 1238 - protein, 91 aa, Homo sapiens
MTIGHLFSTPWTLSLSHVVLALLSHPHGLAFCLIHSYALWPQITAAPGDTVSHMLKEWHQTALLCTFIFFQKQKLSQELPTPGGVSLYVSG

SEQ ID NO: 1239 - protein, 122 aa, Homo sapiens
PVRNSRVDMDSPVNMKFNLSHLGSKEHILELRPAIQPLNNHIRYVISQGNDDSVFRIHQRNGLSYLHTAKKKLMPGTYTLEITSIPLYKKKELKKLEESNEDDYLLGELGEALRMRLQIQLY

SEQ ID NO: 1240 - protein, 298 aa, Homo sapiens
TSAGARKGGGAGPSEVTASLGRRARPDAAMTAALFSLDGPAGGAPWPAEPAPFYEPGRAGKPGRGAEPGALGEPGAAAPAMYDDESAIDFSAYIDSMAAVPTLELCHDELFADLFNSNHKAGGAGPLELLPGGPARPLGPGPAAPRLLKREPDWGDGDAPGSLLPAQVGPCAQTVVSLAAAGQPTPPTSPEPPRSSPRQTPAPGPAREKSAGKRGPDRGSPEYRQRRERNNIAVRKSRDKAKRRNQEMQQKLVELSAENEKLHQRVEQLTRDLAGLRQFFKQLPSPPFLPAAGTADCR

SEQ ID NO: 1241 - protein, 123 aa, Homo sapiens
  misc_feature (1)...(123): Xaa = any amino acid or nothing
DLSLDLPQRGRDPEPLRRATRPDVLRRHSLRPLASARQAAGAAEAWAXVFWLCLSLGTGGSLGVWVGSRPAVTQRLALPAGVDSAMKEEVQRLQSRVDLLEEKLQLVLAPLHSLASQALEHGL

SEQ ID NO: 1242 - protein, 137 aa, Homo sapiens
DQSMGNWQIKRQNGDDPLLTYRFPPKFTLKAGQVVTIWAAGAGATHSPPTDLVWKAQNTWGWRDSLRTVLINSTGEEVAMRNVVRSVTVVEDDEDEDGDDLLHHHHGSHCSSSGDPAEYNLRSRTVLCGTCGQPADK

SEQ ID NO: 1243 - protein, 120 aa, Homo sapiens
  misc_feature (1)...(120): Xaa = any amino acid or nothing
MKQWRGAEAHWETLASPGLDWASAVGMKWGWDSLGQGPGHLGDRNAGGFRGGTKGSRSLLCCSGWAIGAHGSPSHCWGRAGAQVWVLGCVLWWGSARLARLQCSRQTVTDEEGLQEAXAA

SEQ ID NO: 1244 - protein, 149 aa, Homo sapiens
PCGTGRNSRVDFAVDDFVFPFNQWGLQPRSLLLQAARGYVVRKPAQSRLDDDPPPSTLLKDYQNVPGIEKVDDVVKRLLSLEMANKKEMLKIKQEQFMKKIVANPEDTRSLEARIIALSVKIRSYEEHLEKHRKDKAHKRYLLMSIDQR

SEQ ID NO: 1245 - protein, 102 aa, Homo sapiens
GACGTGRNSRVDFAVDDFVFGVSRAVQEFGLARFKSNVTKTMKGFEYILAKLQGEAPSKTLVETAKGAKEKAKETALAATEKGKDLASKAATKKQQQQQQFV

SEQ ID NO: 1246 - protein, 130 aa, Homo sapiens
IIPQIVKYSPDCIIIVVSNPVDILTYVTWKLSGLPKHRVIGSGCNLDSARFRYLMAEKLGIHPSSCHGWILGEHGDSSVAVWSGVNVAGVSLQELNPEMGTDNDSENWKEVHKMVVESAYEVIKLKGYTN

SEQ ID NO: 1247 - protein, 118 aa, Homo sapiens
  misc_feature (1)...(118): Xaa = any amino acid or nothing
VSCRYRSGIPGSTSLSTISXLHNINRPLTMKKEGIQTRNRKMSSKSKKCKKVHDSLEDFPKNSSFNPAAAFSRHMSSLSHISPFSHSSHMLTTPTPMHPPSSLSFGPHHPSSMVTAMG

SEQ ID NO: 1248 - protein, 69 aa, Homo sapiens
GLEGQMGDQVPREQDLAKRSSPGPSPVLNMCNRQSAWATALSPWYCMHAMLAAPFPSWAPRVSPDPGSQ

SEQ ID NO: 1249 - protein, 132 aa, Homo sapiens
TGRHFLRFCHNNKKSQRYLSSGLGGGGTNASGSGFISKIPHILKEMYDADLLEEEAIISWPEKASKKYVSKELAKEIRVTAEPFIKWLKEAEEESSGGEEEDEDENIEVVYSKAASVPKVETVKSDNKDDDI

SEQ ID NO: 1250 - protein, 129 aa, Homo sapiens
ARRAGIRPGGKAAEVCEAKCLRGAPRGENPEEKETARIGPENEEMEQPMQNGEGDRPFGGGEGHQPAGNRRGQARRLAPNFRWAIPNRQINDGMGGDGDDMEIFMEEMREIRRKLRELQLRNCLRILMG

SEQ ID NO: 1251 - protein, 999 aa, Homo sapiens
QSRAGQRGFALPTRTKAPSLRALLRAVSPGAPMQRAVPEGFGRRKLGSDMGNAERAPGSRSFGPVPTLLLLAAALLAVSDALGRPSEEDEELVVPELERAPGHGTTRLRLHAFDQQLDLELRPDSSFLAPGFTLQNVGRKSGSETPLPETDLAHCFYSGTVNGDPSSAAALSLCEGVRGAFYLLGEAYFIQPLPAASERLATAAPGEKPPAPLQFHLLRRNRQGDVGGTCGVVDDEPRPTGKAETEDEDEGTEGEDEGAQWSPQDPALQGVGQPTGTGSIRKKRFVSSHRYVETMLVADQSMAEFHGSGLKHYLLTLFSVAARLYKHPSIRNSVSLVVVKILVIHDEQKGPEVTSNAALTLRNFCNWQKQHNPPSDRDAEHYDTAILFTRQDLCGSQTCDTLGMADVGTVCDPSRSCSVIEDDGLQAAFTTAHELGHVFNMPHDDAKQCASLNGVNQDSHMMASMLSNLDHSQPWSPCSAYMITSFLDNGHGECLMDKPQNPIQLPGDLPGTSYDANRQCQFTFGEDSKHCPDAASTCSTLWCTGTSGGVLVCQTKHFPWADGTSCGEGKWCINGKCVNKTDRKHFDTPFHGSWGMWGPWGDCSRTCGGGVQYTMRECDNPVPKNGGKYCEGKRVRYRSCNLEDCPDNNGKTFREEQCEAHNEFSKASFGSGPAVEWIPKYAGVSPKDRCKLICQAKGIGYFFVLQPKVVDGTPCSPDSTSVCVQGQCVKAGCDRIIDSKKKFDKCGVCGGNGSTCKKISGSVTSAKPGYHDIITIPTGATNIEVKQRNQRGSRNNGSFLAIKAADGTYILNGDYTLSTLEQDIMYKGVVLRYSGSSAALERIRSFSPLKEPLTIQVLTVGNALRPKIKYTYFVKKKKESFNAIPTFSAWVIEEWGECSKSCELGWQRRLVECRDINGQPASECAKEVKPASTRPCADHPCPQWQLGEWSSCSKTCGKGYKKRSLKCLSHDGGVLSHESCDPLKKPKHFIDFCTMAECS

SEQ ID NO: 1252 - protein, 71 aa, Homo sapiens
  misc_feature (1)...(71): Xaa = any amino acid or nothing
PVRNSRVDDFVLQPPGRQMIAIRKRQPEETNNDYXTADGGYMTLNPRAPNLRXXKTSNWTLSPNGHGNSNN

SEQ ID NO: 1253 - protein, 117 aa, Homo sapiens
YRSGIPGSTISSDFEEQADFRQNPSFSTTHLTILGTMAAVAAPRLNLLIIGWNIFRVLLQVFLECCIYWVGFAFRNPPGTQPIARSEVFRYSLQKLAYTVSRTGRQVLGERRQRAPN

SEQ ID NO: 1254 - protein, 144 aa, Homo sapiens
PFRNSRVDPLRRERETEDEDEDEDDIEPAAMKAAAAAPASEDEDDEDDEDDEDDDDDEEDDSEEEAMETTPAKGKKAAKVVPVKAKNVAEDEDEEEDDEDEDDDDDEDDEDDDDEDDEEEEEEEEEEPVKEAPGKRKKEMAKQK

SEQ ID NO: 1255 - protein, 144 aa, Homo sapiens
  misc_feature (1)...(144): Xaa = any amino acid or nothing
TDAEFPPRRFRLTHACCQPPRRRCPWQIILLTLXRVALNFMTGTISSMYQTKAVIIAMIITARVSISVTIFCFQTKVDFTSCTGLFCVLGIVLLVTGIVTSIVLYFQYVYWLHMLYAALGAICFTLFLAYDTQLVLGNRKHTIS

SEQ ID NO: 1256 - protein, 145 aa, Homo sapiens
NGSGMCKAGFAGDDAPRAVFPSIVGRPRHQGVMVGMGQKDSYVGDEAQSKRGILTLKYPIEHGIVTNWDDMEKIWHHTFYNELRVAPEEHPVLLTEAPLNPKANREKMTQIMFETFNTPAMYVAIQAVLSLYASGRNTGIVMDSG

SEQ ID NO: 1257 - protein, 141 aa, Homo sapiens
TFPPDLWGPGRSYRLLHGAGGHLESPARSLPQRPAPDPCRAPRVEQQPSVEGAAALRSCPMCQKEFAPRRLLSLEPWQRRVWGVELPGGLPFLTALVFSGSPRGPSNAGFDKLCRMFFVSLRSSCGPKKKRNRRPGNSGPY

SEQ ID NO: 1258 - protein, 213 aa, Homo sapiens
MAAPAVSGLSRQVRCFSTSVVRPFAKLVRPPVQVYGIEGRYATALYSAASKQNKLEQVEKELLRVAQILKEPKVAASVLNPYVKRSIKVKSLNDITAKERFSPLTTNLINLLAENGRLSNTQGVVSAFSTMMSVHRGEVPCTVTSASPLEEATLSELKTVLKSFLSQGQVLKLEAKTDPSILGGMIVRIGEKYVDMSVKTKIQKLGRAMREIV

SEQ ID NO: 1259 - protein, 239 aa, Homo sapiens [sequence omitted]

SEQ ID NO: 1260 - protein, 425 aa, Homo sapiens
MASKEMFEDTVEERVINEEYKIWKKNTPFLYDLVMTHALQWPSLTVQWLPEVTKPEGKDYALHWLVLGTHTSDEQNHLVVARVHIPNDDAQFDASHCDSDKGEFGGFGSVTGKIECEIKINHEGEVNRARYMPQNPHIIATKTPSSDVLVFDYTKHPAKPDPSGECNPDLRLRGHQKEGYGLSWNSNLSGHLLSASDDHTVCLWDINAGPKEGKIVDAKAIFTGHSAVVEDVAWHLLHESLFGSVADDQKLMIWDTRSNTTSKPSHLVDAHTAEVNCLSFNPYSEFILATGSADKTVALWDLRNLKLKLHTFESHKDEIFQVHWSPHNETILASSGTDRRLNVWDLSKIGEEQSAEDAEDGPPELLFIHGGHTAKISDFSWNPNEPWVICSVSEDNIMQIWQMAENIYNDEESDVTTSELEGQGS

SEQ ID NO: 1261 - protein, 325 aa, Homo sapiens
MKPILLQGHERSITQIKYNREGDLLFTVAKDPIVNVWYSVNGERLGTYMGHTGAVWCVDADWDTKHVLTGSADNSCRLWDCETGKQLALLKTNSAVRTCGFDFGGNIIMFSTDKQMGYQCFVSFFDLRDPSQIDNNEPYMKIPCNDSKITSAVWGPLGECIIAGHESGELNQYSAKSGEVLVNVKEHSRQINDIQLSRDMTMFVTASKDNTAKLFDSTTLEHQKTFRTERPVNSAALSPNYDHVVLGGGQEAMDVTTTSTRIGKFEARFFHLAFEEEFGRVKGHFGPINSVAFHPDGKSYSSGGEDGYVRIHYFDPQYFEFEFEA

SEQ ID NO: 1262 - protein, 2657 aa, Homo sapiens
AARGGRPQSSTGRGSGSSKFEPRSRSASVLAPSALGPPNTSPRQLVAHCALPATRMPVTEKDLAEDAPWKKIQQNTFTRWCNEHLKCVNKRIGNLQTDLSDGLRLIALLEVLSQKRMYRKYHQRPTFRQMQLENVSVALEFLDRESIKLVSIDSKAIVDGNLKLILGLVWTLILHYSISMPVWEDEGDDDAKKQTPKQRLLGWIQNKIPYLPITNFNQNWQDGKALGALVDSCAPGLCPDWESWDPQKPVDNAREAMQQADDWLGVPQVITPEEIIHPDVDEHSVMTYLSQFPKAKLKPGAPLKPKLNPKKARAYGRGIEPTGNMVKQPAKFTVDTISAGQGDVMVFVEDPEGNKEEAQVTPDSDKNKTYSVEYLPKVTGLHKVTVLFAGQHISKSPFEVSVDKAQGDASKVTAKGPGLEAVGNIANKPTYFDIYTAGAGVGDIGVEVEDPQGKNTVELLVEDKGNQVYRCVYKPMQPGPHVVKIFFAGDTIPKSPFVVQVGEACNPNACRASGRGLQPKGVRIRETTDFKVDTKAAGSGELGVTMKGPKGLEELVKQKDFLDGVYAFEYYPSTPGRYSIAITWGGHHIPKSPFEVQVGPEAGMQKVRAWGPGLHGGIVGRSADFVVESIGSEVGSLGFAIEGPSQAKIEYNDQNDGSCDVKYWPKEPGEYAVHIMCDDEDIKDSPYMAFIHPATGGYNPDLVRAYGPGLEKSGCIVNNLAEFTVDPKDAGKAPLKIFAQDGEGQRIDIQMKNRMDGTYACSYTPVKAIKHTIAVVWGGVNIPHSPYRVNIGQGSHPQKVKVFGPGVERSGLKANEPTHFTVDCTEAGEGDVSVGIKCDARVLSEDEEDVDFDIIHNANDTFTVKYVPPAAGRYTIKVLFASQEIPASPFRVKVDPSHDASKVKAEGPGLSKAGVENGKPTHFTVYTKGAGKAPLNVQFNSPLPGDAVKDLDIIDNYDYSHTVKYTPTQQGNMQVLVTYGGDPIPKSPFTVGVAAPLDLSKIKLNGLENRVEVGKDQEFTVDTRGAGGQGKLDVTILSPSRKVVPCLVTPVTGRENSTAKFIPREEGLYAVDVTYDGHPVPGSPYTVEASLPPDPSKVKAHGPGLEGGLVGKPAEFTIDTKGAGTGGLGLTVEGPCEAKIECSDNGDGTCSVSYLPTKPGEYFVNILFEEVHIPGSPFKADIEMPFDPSKVVASGPGLEHGKVGEAGLLSVNCSEAGPGALGLEAVSDSGTKAEVSIQNNKDGTYAVTYVPLTAGMYTLTMKYGGELVPHFPARVKVEPAVDTSRIKVFGPGIEGKDVFREATTDFTVDSRPLTQVGGDHIKAHIANPSGASTECFVTDNADGTYQVEYTPFEKGLHVVEVTYDDVPIPNSPFKVAVTEGCQPSRVQAQGPGLKEAFTNKPNVFTVVTRGAGIGGLGITVEGPSESKINCRDNKDGSCSAEYIPFAPGDYDVNITYGGAHIPGSPFRVPVKDVVDPSKVKIAGPGLGSGVRARVLQSFTVDSSKAGLAPLEVRVLGPRGLVEPVNMVDNGDGTHTVTYTPSQEGPYMVSVKYADEEIPRSPFKVKVLPTYDASKVTASGPGLSSYGVPASLPVDFAIDARDAGEGLLAVQITDQEGKPKRAIVHDNKDGTYAVTYIPDKTGRYMIGVTYGGDDIPLSPYRIRATQTGDASKCLATGPGIASTVKTGEEVGFVVDAKTAGKGKVTCTVLTPDGTEAEADVIENEDGTYDIFYTAAKPGTYVIYVRFGGVDIPNSPFTVMATDGEVTAVEEAPVNACPPGFRPWVTEEAYVPVSDMNGLGFKPFDLVIPFAVRKGEITGEVHMPSGKTATPEIVDNKDGTVTVRYAPTEVGLHEMHIKYMGSHIPESPLQFYVNYPNSGSVSAYGPGLVYGVANKTATFTIVTEDAGEGGLDLAIEGPSKAEISCIDNKDGTCTVTYLPTLPGDYSILVKYNDKHIPGSPFTAKITDDSRRCSQVKLGSAADFLLDISETDLSSLTASIKAPSGRDEPCLLKRLPNNHIGISFIPREVGEHLVSIKKNGNHVANSPVSIMVVQSEIGDARRAKVYGRGLSEGRTFEMSDFIVDTRDAGYGGISLAVEGPSKVDIQTEDLEDGTCKVSYFPTVPGVYIVSTKFADEHVPGSPFTVKISGEGRVKESITRTSRAPSVATVGSICDLNLKIPEINSSDMSAHVTSPSGRVTEAEIVPMGKNSHCVRFVPQEMGVHTVSVKYRGQHVTGSPFQFTVGPLGEGGAHKVRAGGPGLERGEAGVPAEFSIWTREAGAGGLSIAVEGPSKAEITFDDHKNGSCGVSYIAQEPGNYEVSIKFNDEHIPESPYLVPVIAPSDDARRLTVMSLQESGLKVNQPASFAIRLNGAKGKIDAKVHSPSGAVEECHVSELEPDKYAVRFIPHENGVHTIDVKFNGSHVVGSPFKVRVGEPGQAGNPALVSAYGTGLEGGTTGIQSEFFINTTRAGPGTLSVTIEGPSKVKMDCQETPEGYKVMYTPMAPGNYLISVKYGGPNHIVGSPFKAKVTGQRLVSPGSANETSSILVESVTRSSTETCYSAIPKASSDASKVTSKGAGLSKAFVGQKSSFLVDCSKAGSNMLLIGVHGPTTPCEEVSMKHVGNQQYNVTYVVKERGDYVLAVKWGEEHIPGSPFHVTVP

SEQ ID NO: 1263 - protein, 373 aa, Homo sapiens
MELPSGPGPERLFDSHRLPGDCFLLLVLLLYAPVGFCLLVLRLFLGIHVFLVSCALPDSVLRRFVVRTMCAVLGLVARQEDSGLRDHSVRVLISNHVTPFDHNIVNLLTTCSTPLLNSPPSFVCWSRGFMEMNGRGELVESLKRFCASTRLPPTPLLLFPEEEATNGREGLLRFSSWPFSIQDVVQPLTLQVQRPLVSVTVSDASWVSELLWSLFVPFTVYQVRWLRPVHRQLGEANEEFALRVQQLVAKELGQTGTRLTPADKAEHMKRQRHPRLRPQSAQSSFPPSPGPSPDVQLATLAQRVKEVLPHVPLGVIQRDLAKTGCVDLTITNLLEGAVAFMPEDITKGTQSLPTASASKAFDACLMMMTPQAL

SEQ ID NO: 1264 - protein, 244 aa, Homo sapiens
METVNNLLTMMSTSNSKDPTVAKEEQISFRDCAEVFKSGHTTNGIYTLTFPNSTEEIKAYCDMEAGGGGWTIIQRREDGSVDFQRTWKEYKVGFGNPSGEYWLGNEFVSQLTNQQRYVLKIHLKDWEGNEAYSLYEHFYLSSEELNYRIHLKGLTGTAGKISSISQPGNDFSTKDGDNDKCICKCSQMLTGGWWFDACGPSNLNGMYYPQRQNTNKFNGIKWYYWKGSGYSLKATTMMIRPADF

SEQ ID NO: 1265 - protein, 179 aa, Homo sapiens
MSTGSLSDVEDLQEVEMLECDGLKMDSNKEFVTSNESTEESSNCENGSPQKGRGGLGKRRKAPTKKSPLSGVSQEGKQVQRNAANARERARMRVLSKAFSRLKTTLPWVPPDTKLSKLDTLRLASSYIAHLRQILANDKYENGYIHPVNLTWPFMVAGKPESDLKEVVTASRLCGTTAS

SEQ ID NO: 1266 - protein, 228 aa, Homo sapiens
MPVKGGTKCIKYLLFGFNFIFWLAGIAVLAIGLWLRFDSQTKSIFEQETNNNNSSFYTGVYILIGAGALMMLVGFLGCCGAVQESQCMLGLFFGFLLVIFAIEIAAAIWGYSHKDEVIKEVQEFYKDTYNKLKTKDEPQRETLKAIHYALNCCGLAGGVEQFISDICPKKDVLETFTVKSCPDAIKEVFDNKFHIIGAVGIGIAVVMIFGMIFSMILCCAIRRNREMV

SEQ ID NO: 1267 - protein, 908 aa, Homo sapiens [sequence omitted]

SEQ ID NO: 1268 - protein, 321 aa, Homo sapiens
MAMATKGGTVKAASGFNAMEDAQTLRKAMKGLGTDEDAIISVLAYRNTAQRQEIRTAYKSTIGRDLIDDLKSELSGNFEQVIVGMMTPTVLYDVQELRRAMKGAGTDEGCLIEILASRTPEEIRRISQTYQQQYGRSLEDDIRSDTSFMFQRVLVSLSAGGRDEGNYLDDALVRQDAQDLYEAGEKKWGTDEVKFLTVLCSRNRNHLLHVFDEYKRISQKDIEQSIKSETSGSFEDALLAIVKCMRNKSAYFAEKLYKSMKGLGTDDNTLIRVMVSRAEIDMLDIRAHFKRLYGKSLYSFIKGDTSGDYRKVLLVLCGGDD

SEQ ID NO: 1269 - protein, 770 aa, Homo sapiens [sequence omitted]

SEQ ID NO: 1270 - protein, 147 aa, Homo sapiens
MVHLTPEEKSAVTALWGKVNVDEVGGEALGRLLVVYPWTQRFFESFGDLSTPDAVMGNPKVKAHGKKVLGAFSDGLAHLDNLKGTFATLSELHCDKLHVDPENFRLLGNVLVCVLAHHFGKEFTPPVQAAYQKVVAGVANALAHKYH

SEQ ID NO: 1271 - protein, 771 aa, Homo sapiens
MGRAGTGTGGEAVAAVVAGPLLLLLLARPPPASAGYSGKSEVGLVSEHFSQAPQRLSFYSWYGSARLFRFRVPPDAVLLRWLLQVSRESGAACTDAEITVHFRSGAPPVINPLGTSFPDDTAVQPSFQVGVPLSTAPRSNASVNVSHPAPGDWFVAAHLPPSSQKIELKGLAPTCAYVFQPELLVTRVVEISIMEPDVPLPQTLLSHPSYLKVFVPDYTRELLLELRDCVSNGSLGCPVRLTVGPVTLPSNFQKVLTCTGAPWPCRLLLPSPPWDRWLQVTAESLVGPLGTVAFSAVAALTACRPRSVTVQPLLQSSQNQSFNASSGLLSPSPDHQDLGRSGRVDRSPFCLTNYPVTREDMDVVSVHFQPLDRVSVRVCSDTPSVMRLRLNTGMDSGGSLTISLRANKTEMRNETVVVACVNAASPFLGFNTSLNCTTAFFQGYPLSLSAWSRRANLIIPYPETDNWYLSLQLMCPENAEDCEQAVVHVETTLYLVPCLNDCGPYGQCLLLRRHSYLYASCSCKAGWRGWSCTDNSTAQTVAQQRAATLLLTLSNLMFLAPIAVSVRRFFLVEASVYAYTMFFSTFYHACDQPGEAVLCILSYDTLQYCDFLGSGAAIWVTILCMARLKTVLKYVLFLLGTLVIAMSLQLDRRDMWNMLGPCLFAFVIMASMWAYRCGHRRQCYPTSWQRWAFYLLPGVSMASVGIAIYTSMMTSDNYYYTHSIWHILLAGSAALLLPPPDQPAEPWACSQKFPCHYQICKNDREELYAVT

SEQ ID NO: 1272 - protein, 172 aa, Homo sapiens
MLHGDAGRLSPCSKDFGVLRFSPRDLKFTSYRCQMTYILRSLRTSSPSAALVLRHEPWDVAASVGQDGHWATLPGTRHRARWRDFSPVAALAPPFCPRLLFCQTSSLYHSGSGARPACPLAIATFPSCLLPAVSLKICQQVKSIWGFHCLHSSPQSLVVPKREVHIGAWWPP

SEQ ID NO: 1273 - protein, 390 aa, Homo sapiens
AKEWCPGNMGDWSALGKLLDKVQAYSTAGGKVWLSVLFIFRILLLGTAVESAWGDEQSAFRCNTQQPGCENVCYDKSFPISHVRFWVLQIIFVSVPTLLYLAHVFYVMRKEEKLNKKEEELKVAQTDGVNVDMHLKQIEIKKFKYGIEEHGKVKMRGGLLRTYIISILFKSIFEVAFLLIQWYIYGFSLSAVYTCKRDPCPHQVDCFLSRPTEKTIFIIFMLVVSLVSLALNIIELFYVFFKGVKDRVKGKSDPYHATSGALSPAKDCGSQKYAYFNGCSSPTAPLSPMSPPGYKLVTGDRNNSSCRNYNKQASEQNWANYSAEQNRMGQAGSTISNSHAQPFDFPDDNQNSKKLAAGHELQPLAIVDQRPSSRASSRASSRPRPDDLEI

SEQ ID NO: 1274 - protein, 236 aa, Homo sapiens
CAAPPRGRILGGREAEAHARPYMASVQLNGAHLCGGVLVAEQWVLSAAHCLEDAADGKVQVLLGAHSLSQPEPSKRLYDVLRAVPHPDSQPDTIDHDLLLLQLSEKATLGPAVRPLPWQRVDRDVAPGTLCDVAGWGIVNHAGRRPDSLQHVLLPVLDRATCNRRTHHDGAITERLMCAESNRRDSCKGDSGGPLVCGGVLEGVVTSGSRVCGNRKKPGIYTRVASYAAWIDSVLA

SEQ ID NO: 1275 - protein, 97 aa, Homo sapiens
MISGGEVEGRCPGQTGPLCPHTSLDPFAKLVKLRGTGFPVAPLPYSKSPSDFMSLLISTVPGSWRGRTPGPRGKRGGSPVSCACTSPAPIASAHPCV

SEQ ID NO: 1276 - protein, 778 aa, Homo sapiens
MAQKMDCGAGLLGFQAEASVEDSALLMQTLMEAIQISEAPPTNQATAAASPQSSQPPTANEMADIQVSAAAARPKSAFKVQNATTKGPNGVYDFSQAHNAKDVPNTQPKAAFKSQNATPKGPNAAYDFSQAATTGELAANKSEMAFKAQNATTKVGPNATYNFSQSLNANDLANSRPKTPFKAWNDTTKAPTADTQTQNVNQAKMATSQADIETDPGISEPDGATAQTSADGSQAQNLESRTIIRGKRTRKINNLNVEENSSGDQRRAPLAAGTWRSAPVPVTTQNPPGAPPNVLWQTPLAWQNPSGWQNQTARQTPPARQSPPARQTPPAWQNPVAWQNPVIWPNPVIWQNPVIWPNPIVWPGPVVWPNPLAWQNPPGWQTPPGWQTPPGWQGPPDWQGPPDWPLPPDWPLPPDWPLPTDWPLPPDWIPADWPIPPDWQNLRPSPNLRPSPNSRASQNPGAAQPRDVALLQERANKLVKYLMLKDYTKVPIKRSEMLRDIIREYTDVYPEIIERACFVLEKKFGIQLKEIDKEEHLYILISTPESLAGILGTTKDTPKLGLLLVILGVIFMNGNRASEAVLWEALRKMGLRPGVRHPLLGDLRKLLTYEFVKQKYLDYRRVPNSNPPEYEFLWGLRSYHETSKMKVLRFIAEVQKRDPRDWTAQFMEAADEALDALDAAAAEAEARAEARTRMGIGDEAVSGPWSWDDIEFELLTWDEEGDFGDPWSRIPFTFWARYHQNARSRFPQTFAGPIIGPGGTASANFAANFGAIGFFWVE

SEQ ID NO: 1277 - protein, 125 aa, Homo sapiens
MLDLQKQLGRFPGTFVGTTEPASPPLSSTSPTTAAATMPVVPSVASLAPPGEASLCLEEVAPPASGTRKARVLYDYEAADSSELALLADELITVYSLPGMDPDWLIGERGNKKGKVPVTYLELLS

SEQ ID NO: 1278 - protein, 161 aa, Homo sapiens
MNARGLGSELKDSIPVTELSASGPFESHDLLRKGFSCVKNELLPSHPLELSEKNFQLNQDKMNFSTLRNIQGLFAPLKLQMEFKAVQQVQRLPFLSSSNLSLDVLRGNDETIGFEDILNDPSQSEVMGEPHLMVEYKLGYCNSVLFMETEGCILFIVIFVL

SEQ ID NO: 1279 - protein, 87 aa, Homo sapiens
MQKVTLGLLVFLAGFPVLDANDLEDKNSPFYYDWHSLQVGGLICAGVLCAMGIIIVMSAKCKCKFGQKSGHHPGETPPLITPGSAQS

SEQ ID NO: 1280 - protein, 284 aa, Homo sapiens
MFDKTRLPYVALDVLCVLLAGLPFAILTSRHTPFQRGVFCNDESIKYPYKEDTIPYALLGGIIIPFSIIVIILGETLSVYCNLLHSNSFIRNNYIATIYKAIGTFLFGAAASQSLTDIAKYSIGRLRPHFLDVCDPDWSKINCSDGYIEYYICRGNAERVKEGRLSFYSGHSSFSMYCMLFVALYLQARMKGDWARLLRPTLQFGLVAVSIYVGLSRVSDYKHHWSDVLTGLIQGALVAILVAVYVSDFFKERTSFKERKEEDSHTTLHETPTTGNHYPSNHQP

SEQ ID NO: 1281 - protein, 539 aa, Homo sapiens [sequence omitted]

SEQ ID NO: 1282 - protein, 440 aa, Homo sapiens
MALLVLGLVSCTFFLAVNGLYSSSDDVIELTPSNFNREVIQSDSLWLVEFYAPWCGHCQRLTPEWKKAATALKDVVKVGAVDADKHHSLGGQYGVQGFPTIKIFGSNKNRPEDYQGGRTGEAIVDAALSALRQLVKDRLGGRSGGYSSGKQGRSDSSSKKDVIELTDDSFDKNVLDSEDVWMVEFYAPWCGHCKNLEPEWAAAASEVKEQTKGKVKLAAVDATVNQVLASRYGIRGFPTIKIFQKGESPVDYDGGRTRSDIVSRALDLFSDNAPPPELLEIINEDIAKRTCEEHQLCVVAVLPHILDTGAAGRNSYLEVLLKLADKYKKKMWGWLWTEAGAQSELETALGIGGFGYPAMAAINARKMKFALLKGSFSEQGINEFLRELSFGRGSTAPVGGGAFPTIVEREPWDGRDGELPVEDDIDLSDVELDDLGKDEL

SEQ ID NO: 1283 - protein, 1627 aa, Homo sapiens
MRLWSWVLHLGLLSAALGCGLAERPRRARRDPRAGRPPRPAAGPATCATRGPRPPRLAAAAAAAGRAWEAVRVPRRRQQREARGATEEPSPPSRALYFSGRGEQLRVLRADLELPRDAFTLQVWLRAEGGQRSPAVITGLYDKCSYISRDRGWVVGIHTISDQDNKDPRYFFSLKTDRARQVTTINAHRSYLPGQWVYLAATYDGQFMKLYVNGAQVATSGEQVGGIFSPLTQKCKVLMLGGSALNHNYRGYIEHFSLWKVARTQREILSDMETHGAHTALPQLLLQENWDNVKHAWSPMKDGSSPKVEFSNAHGFLLDTSLEPPLCGQTLCDNTEVIASYNQLSSFRQPKVVRYRVVNLYEDDHKNPTVTREQVDFQHHQLAEAFKQYNISWELDVLEVSNSSLRRRLILANCDISKIGDENCDPECNHTLTGHDGGDCRHLRHPAFVKKQHNGVCDMDCNYERFNFDGGECCDPEITNVTQTCFDPDSPHRAYLDVNELKNILKLDGSTHLNIFFAKSSEEELAGVATWPWDKEALMHLGGIVLNPSFYGMPGHTHTMIHEIGHSLGLYHVFRGISEIQSCSDPCMETEPSFETGDLCNDTNPAPKHKSCGDPGPGNDTCGFHSFFNTPYNNFMSYADDDCTDSFTPNQVARMHCYLDLVYQGWQPSRKPAPVALAPQVLGHTTDSVTLEWFPPIDGHFFERELGSACHLCLEGRILVQYASNASSPMPCSPSGHWSPREAEGHPDVEQPCKSSVRTWSPNSAVNPHTVPPACPEPQGCYLELEFLYPLVPESLTIWVTFVSTDWDSSGAVNDIKLLAVSGKNISLGPQNVFCDVPLTIRLWDVGEEVYGIQIYTLDEHLEIDAAMLTSTADTPLCLQCKPLKYKVVRDPPLQMDVASILHLNRKFVDMDLNLGSVYQYWVITISGTEESEPSPAVTYIHGRGYCGDGIIQKDQGEQCDDMNKINGDGCSLFCRQEVSFNCIDEPSRCYFHDGDGVCEEFEQKTSIKDCGVYTPQGFLDQWASNASVSHQDQQCPGWVIIGQPAASQVCRTKVIDLSEGISQHAWYPCTISYPYSQLAQTTFWLRAYFSQPMVAAAVIVHLVTDGTYYGDQKQETISVQLLDTKDQSHDLGLHVLSCRNNPLIIPVVHDLSQPFYHSQAVRVSFSSPLVAISGVALRSFDNFDPVTLSSCQRGETYSPAEQSCVHFACEKTDCPELAVENASLNCSSSDRYHGAQCTVSCRTGYVLQIRRDDELIKSQTGPSVTVTCTEGKWNKQVACEPVDCSIPDHHQVYAASFSCPEGTTFGSQCSFQCRHPAQLKGNNSLLTCMEDGLWSFPEALCELMCLAPPPVPNADLQTARCRENKHKVGSFCKYKCKPGYHVPGSSRKSKKRAFKTQCTQDGSWQEGACVPVTCDPPPPKFHGLYQCTNGFQFNSECRIKCEDSDASQGLGSNVIHCRKDGTWNGSFHVCQEMQGQCSVPNELNSNLKLQCPDGYAIGSECATSCLDHNSESIILPMNVTVRDIPHWLNPTRVERVVCTAGLKWYPHPALIHCVKGCEPFMGDNYCDAINNRAFCNYDGGDCCTSTVKTKKVTPFPMSCDLQGDCACRDPQAQEHSRKDLRGYSHG

SEQ ID NO: 1284 - protein, 274 aa, Homo sapiens
MKKKTRRRSTRSEELTRSEELTLSEEATWSEEATQSEEATQGEEMNRSQEVTRDEESTRSEEVTREEMAAAGLTVTVTHSNEKHDLHVTSQQGSSEPVVQDLAQVVEEVIGVPQSFQKLIFKGKSLKEMETPLSALGIQDGCRVMLIGKKNSPQEEVELKKLKHLEKSVEKIADQLEELNKELTGIQQGFLPKDLQAEALCKLDRRVKATIEQFMKILEEIDTLILPENFKDSRLKRKGLVKKVQAFLAECDTVEQNICQETERLQSTNFALAE

SEQ ID NO: 1285 - protein, 431 aa, Homo sapiens
PHLQRATEKPRLSRRPRRSERAVTVLLPSSASQRPPVSAPRPLARLCLTATMMFSGFNADYEASSSRCSSASPAGDSLSYYHSPADSFSSMGSPVNAQDFCTDLAVSSANFIPTVTAISTSPDLQWLVQPALVSSVAPSQTRAPHPFGVPAPSAGAYSRAGVVKTMTGGRAQSIGRRGKVEQLSPEEEEKRRIRRERNKMAAAKCRNRRRELTDTLQAETDQLEDEKSALQTEIANLLKEKEKLEFILAAHRPACKIPDDLGFPEEMSVASLDLTGGLPEVATPESEEAFTLPLLNDPEPKPSVEPVKSISSMELKTEPFDDFLFPASSRPSGSETARSVPDMDLSGSFYAADWEPLHSGSLGMGPMATELEPLCTPVVTCTPSCTAYTSSFVFTYPEADSFPSCAAAHRKGSSSNEPSSDSLSSPTLLAL

SEQ ID NO: 1286 - protein, 653 aa, Homo sapiens
MKLSLVAAMLLLLSAARAEEEDKKEDVGTVVGIDLGTTYSCVGVFKNGRVEIIANDQGNRITPSYVAFTPEGERLIGDAAKNQLTSNPENTVFDAKRLIGRTWNDPSVQQDIKFLPFKVVEKKTKPYIQVDIGGGQTKTFAPEEISAMVLTKMKETAEAYLGKKVTHAVVTVPAYFNDAQRQATKDAGTIAGLNVMRIINEPTAAAIAYGLDKREGEKNILVFDLGGGTFDVSLLTIDNGVFEVVATNGDTHLGGEDFDQRVMEHFIKLYKKKTGKDVRKDNRAVQKLRREVEKAKALSSQHQARIEIESFYEGEDFSETLTRAKFEELNMDLFRSTMKPVQKVLEDSDLKKSDIDEIVLVGGSTRIPKIQQLVKEFFNGKEPSRGINPDEAVAYGAAVQAGVLSGDQDTGDLVLLHVCPLTLGIETVGGVMTKLIPSNTVVPTKNSQIFSTASDNQPTVTIKVYEGERPLTKDNHLLGTFDLTGIPPAPRGVPQIEVTFEIDVNGILRVTAEDKGTGNKNKITITNDQNRLTPEEIERMVNDAEKFAEEDKKLKERIDTRNELESYAYSLKNQIGDKEKLGGKLSSEDKETMEKAVEEKIEWLESHQDADIEDFKAKKKELEEIVQPIISKLYGSAGPPPTGEEDTAEKDEL

SEQ ID NO: 1287 - protein, 505 aa, Homo sapiens
MRLRRLALFPGVALLLAAARLAAASDVLELTDDNFESRISDTGSAGLMLVEFFAPWCGHCKRLAPEYEAAATRLKGIVPLAKVDCTANTNTCNKYGVSGYPTLKIFRDGEEAGAYDGPRTADGIVSHLKKQAGPASVPLRTEEEFKKFISDKDASIVGFFDDSFSEAHSEFLKAASNLRDNYRFAHTNVESLVNEYDDNGEGIILFRPSHLTNKFEDKTVAYTEQKMTSGKIKKFIQENIFGICPHMTEDNKDLIQGKDLLIAYYDVDYEKNAKGSNYWRNRVMMVAKKFLDAGHKLNFAVASRKTFSHELSDFGLESTAGEIPVVAIRTAKGEKFVMQEEFSRDGKALERFLQDYFDGNLKRYLKSEPIPESNDGPVKVVVAENFDEIVNNENKDVLIEFYAPWCGHCKNLEPKYKELGEKLSKDPNIVIAKMDATANDVPSPYEVRGFPTIYFSPANKKLNPKKYEGGRELSDFISYLQREATNPPVIQEEKPKKKKKAQEDL

SEQ ID NO: 1288 - protein, 281 aa, Homo sapiens [sequence omitted]

SEQ ID NO: 1289 - protein, 289 aa, Homo sapiens
MSGFSTEERAAPFSLEYRVFLKNEKGQYISPFHDIPIYADKDVFHMVVEVPRWSNAKMEIATKDPLNPIKQDVKKGKLRYVANLFPYKGYIWNYGAIPQTWEDPGHNDKHTGCCGDNDPIDVCEIGSKVCARGEIIGVKVLGILAMIDEGETDWKVIAINVDDPDAANYNDINDVKRLKPGYLEATVDWFRRYKVPDGKPENEFAFNAEFKDKDFAIDIIKSTHDHWKALVTKKTNGKGISCMNTTLSESPFKCDPDAARAIVDALPPPCESACTVPTDVDKWFHHQKN

SEQ ID NO: 1290 - protein, 572 aa, Homo sapiens
MAAPRPSPAISVSVSAPAFYAPQKKFGPVVAPKPKVNPFRPGDSEPPPAPGAQRAQMGRVGEIPPPPPEDFPLPPPPLAGDGDDAEGALGGAFPPPPPPIEESFPPAPLEEEIFPSPPPPPEEEGGPEAPIPPPPQPREKVSSIDLEIDSLSSLLDDMTKNDPFKARVSSGYVPPPVATPFSSKSSTKPAAGGTAPLPPWKSPSSSQPLPQVPAPAQSQTQFHVQPQPQPKPQVQLHVQSQTQPVSLANTQPRGPPASSPAPAPKFSPVTPKFTPVASKFSPGAPGGSGSQPNQKLGHPEALSAGTGSPQPPSFTYAQQREKPRVQEKQHPVPPPAQNQNQVRSPGAPGPLTLKEVEELEQLTQQLMQDMEHPQRQNVAVNELCGRCHQPLARAQPAVRALGQLFHIACFTCHQCAQQLQGQQFYSLEGAPYCEGCYTDTLEKCNTCGEPITDRMLRATGKAYHPHCFTCVVCARPLEGTSFIVDQANRPHCVPDYHKQYAPRCSVCSEPIMPEPGRDETVRVVALDKNFHMKCYKCEDCGKPLSIEADDNGCFPLDGHVLCRKCHTARAQT

SEQ ID NO: 1291 - protein, 173 aa, Homo sapiens
MSLLGPKVLLFLAAFIITSDWIPLGVNSQRGDDVTQATPETFTEDPNLVNDPATDETVLAVLADIAPSTDDLASLSEKNTTAECWDEKFTCTRLYSVHRPVKQCIHQLCFTSLRRMYIVNKEICSRLVCKEHEAMKDELCRQMAGLPPRRLRRSNYFRLPPCENVDLQRPNGL

SEQ ID NO: 1292 - protein, 393 aa, Homo sapiens
MALKVATVAGSAAKAVLGPALLCRPWEVLGAHEVPSRNIFSEQTIPPSAKYGGRHTVTMIPGDGIGPELMLHVKSVFRHACVPVDFEEVHVSSNADEEDIRNAIMAIRRNRVALKGNIETNHNLPPSHKSRNNILRTSLDLYANVIHCKSLPGVVTRHKDIDILIVRENTEGEYSSLEHESVAGVVESLKIITKAKSLRIAEYAFKLAQESGRKKVTAVHKANIMKLGDGLFLQCCREVAARYPQITFENMIVDNTTMQLVSRPQQFDVMVMPNLYGNIVNNVCAGLVGGPGLVAGANYGHVYAVFETATRNTGKSIANKNIANPTATLLASCMMLDHLKLHSYATSIRKAVLASMDNENMHTPDIGGQGTTSEAIQDVIRHIRVINGRAVEA

SEQ ID NO: 1293 - protein, 166 aa, Homo sapiens
MASGVAVSDGVIKVFNDMKVRKSSTPEEVKKRKKAVLFCLSEDKKNIILEEGKEILVGDVGQTVDDPYATFVKMLPDKDCRYALYDATYETKESKKEDLVFIFWAPESAPLKSKMIYASSKDAIKKKLTGIKHELQANCYEEVKDRCTLAEKLGGSAVISLEGKPL

SEQ ID NO: 1294 - protein, 158 aa, Homo sapiens [sequence omitted]

SEQ ID NO: 1295 - protein, 197 aa, Homo sapiens
MSGPRPVVLSGPSGAGKSTLLKRLLQEHSGIFGFSVSHTTRNPRPGEENGKDYYFVTREVMQRDIAAGDFIEHAEFSGNLYGTSKVAVQAVQAMNRICVLDVDLQGVRNIKATDLRPIYISVQPPSLHVLEQRLRQRNTETEESLVKRLAAAQADMESSKEPGLFDVVIINDSLDQAYAELKEALSEEIKKAQRTGA

SEQ ID NO: 1296 - protein, 55 aa, Homo sapiens
RFVCSTIKVLRDLSSDRSNPGRFLSTSNSSLYEKDKRNKAYFTKRPSPVNDIIST

SEQ ID NO: 1297 - protein, 250 aa, Homo sapiens [sequence omitted]

SEQ ID NO: 1298 - protein, 202 aa, Homo sapiens [sequence omitted]

SEQ ID NO: 1299 - protein, 192 aa, Homo sapiens [sequence omitted]

SEQ ID NO: 1300 - protein, 280 aa, Homo sapiens [sequence omitted]

SEQ ID NO: 1301 - protein, 227 aa, Homo sapiens
MQEPRRVTHCLGKRGVKTPQLQPGSAFLPRVRRQSFTARSDSYTTVRDFLAVPRTISSASATLIMAVAVSHFRPGPEVWDTASMAASKVKQDMPPPGGYGPIDYKRNLPRRGLSGYSMLAIGIGTLIYGHWSIMKWNRERRRLQIEDFEARIALLPLLQAETDRRTLQMLRENLEEEAIIMKDVPDWKVGESVFHTTRWVPPLIGELYGLRTTEEALHASHGFMWYT

SEQ ID NO: 1302 - protein, 215 aa, Homo sapiens
MEKLYSENEGMASNQGKMENEEQPQDERKPEVTCTLEDKKLENEGKTENKGKTGDEEMLKDKGKPESEGEAKEGKSEREGESEMEGGSEREGKPEIEGKPESEGEPGSETRAAGKRPAEDDVPRKAKRKTNKGLAHYLKEYKEAIHDMNFSNEDMIREFDNMAKVQDEKRKSKQKLGAFLWMQRNLQDPFYPRGPREFRGGCRAPRRDIEDIPYV

SEQ ID NO: 1303 - protein, 2647 aa, Homo sapiens
MSSSHSRAGQSAAGAAPGGGVDTRDAEMPATEKDLAEDAPWKKIQQNTFTRWCNEHLKCVSKRIANLQTDLSDGLRLIALLEVLSQKKMHRKHNQRPTFRQMQLENVSVALEFLDRESIKLVSIDSKAIVDGNLKLILGLIWTLILHYSISMPMWDEEEDEEAKKQTPKQRLLGWIQNKLPQLPITNFSRDWQSGRALGALVDSCAPGLCPDWDSWDASKPVTNAREAMQQADDWLGIPQVITPEEIVDPNVDEHSVMTYLSQFPKAKLKPGAPLRPKLNPKKARAYGPGIEPTGNMVKKRAEFTVETRSAGQGEVLVYVEDPAGHQEEAKVTANNDKNRTFSVWYVPEVTGTHKVTVLFAGQHIAKSPFEVYVDKSQGDASKVTAQGPGLEPSGNIANKTTYFEIFTAGAGTGEVEVVIQDPMGQKGTVEPQLEARGDSTYRCSYQPTMEGVHTVHVTFAGVPIPRSPYTVTVGQACNPSACRAVGRGLQPKGVRVKETADFKVYTKGAGSGELKVTVKGPKGEERVKQKDLGDGVYGFEYYPMVPGTYIVTITWGGQNIGRSPFEVKVGTECGNQKVRAWGPGLEGGVVGKSADFVVEAIGDDVGTLGFSVEGPSQAKIECDDKGDGSCDVRYWPQEAGEYAVHVLCNSEDIRLSPFMADIRDAPQDFHPDRVKARGPGLEKTGVAVNKPAEFTVDAKHGGKAPLRVQVQDNEGCPVEALVKDNGNGTYSCSYVPRKPVKHTAMVSWGGVSIPNSPFRVNVGAGSHPNKVKVYGPGVAKTGLKAHEPTYFTVDCAEAGQGDVSIGIKCAPGVVGPAEADIDFDIIRNDNDTFTVKYTPRGAGSYTIMVLFADQATPTSPIRVKVEPSHDASKVKAEGPGLSRTGVELGKPTHFTVNAKAAGKGKLDVQFSGLTKGDAVRDVDIIDHHDNTYTVKYTPVQQGPVGVNVTYGGDPIPKSPFSVAVSPSLDLSKIKVSGLGEKVDVGKDQEFTVKSKGAGGQGKVASKIVGPSGAAVPCKVEPGLGADNSVVRFLPREEGPYEVEVTYDGVPVPGSPFPLEAVAPTKPSKVKAFGPGLQGGSAGSPARFTIDTKGAGTGGLGLTVEGPCEAQLECLDNGDGTCSVSYVPTEPGDYNINILFADTHIPGSPFKAHVVPCFDASKVKCSGPGLERATAGEVGQFQVDCSSAGSAELTIEICSEAGLPAEVYIQDHGDGTHTITYIPLCPGAYTVTIKYGGQPVPNFPSKLQVEPAVDTSGVQCYGPGIEGQGVFREATTEFSVDARALTQTGGPHVKARVANPSGNLTETYVQDRGDGMYKVEYTPYEEGLHSVDVTYDGSPVPSSPFQVPVTEGCDPSRVRVHGPGIQSGTTNKPNKFTVETRGAGTGGLGLAVEGPSEAKMSCMDNKDGSCSVEYIPYEAGTYSLNVTYGGHQVPGSPFKVPVHDVTDASKVKCSGPGLSPGMVRANLPQSFQVDTSKAGVAPLQVKVQGPKGLVEPVDVVDNADGTQTVNYVPSREGPYSISVLYGDEEVPRSPFKVKVLPTHDASKVKASGPGLNTTGVPASLPVEFTIDAKDAGEGLLAVQITDPEGKPKKTHIQDNHDGTYTVAYVPDVTGRYTILIKYGGDEIPFSPYRVRAVPTGDASKCTVTVSIGGHGLGAGIGPTIQIGEETVITVDTKAAGKGKVTCTVCTPDGSEVDVDVVENEDGTFDIFYTAPQPGKYVICVRFGGEHVPNSPFQVTALAGDQPSVQPPLRSQQLAPQYTYAQGGQQTWAPERPLVGVNGLDVTSLRPFDLVIPFTIKKGEITGEVRMPSGKVAQPTITDNKDGTVTVRYAPSEAGLHEMDIRYDNMHIPGSPLQFYVDYVNCGHVTAYGPGLTHGVVNKPATFTVNTKDAGEGGLSLAIEGPSKAEISCTDNQDGTCSVSYLPVLPGDYSILVKYNEQHVPGSPFTARVTGDDSMRMSHLKVGSAADIPINISETDLSLLTATVVPPSGREEPCLLKRLRNGHVGISFVPKETGEHLVHVKKNGQHVASSPIPVVISQSEIGDASRVRVSGQGLHEGHTFEPAEFIIDTRDAGYGGLSLSIEGPSKVDINTEDLEDGTCRVTYCPTEPGNYIINIKFADQHVPGSPFSVKVTGEGRVKESITRRRRAPSVANVGSHCDLSLKIPEISIQDMTAQVTSPSGKTHEAEIVEGENHTYCIRFVPAEMGTHTVSVKYKGQHVPGSPFQFTVGPLGEGGAHKVRAGGPGLERAEAGVPAEFSIWTREAGAGGLAIAVEGPSKAEISFEDRKDGSCGVAYVVQEPGDYEVSVKFNEEHIPDSPFVVPVASPSGDARRLTVSSLQESGLKVNQPASFAVSLNGAKGAIDAKVHSPSGALEECYVTEIDQDKYAVRFIPRENGVYLIDVKFNGTHIPGSPFKIRVGEPGHGGDPGLVSAYGAGLEGGVTGNPAEFVVNTSNAGAGALSVTIDGPSKVKMDCQECPEGYRVTYTPMAPGSYLISIKYGGPYHIGGSPFKAKVTGPRLVSNHSLHETSSVFVDSLTKATCAPQHGAPGPGPADASKVVAKGLGLSKAYVGQKSSFTVDCSKAGNNMLLVGVHGPRTPCEEILVKHVGSRLYSVSYLLKDKGEYTLVVKWGDEHIPGSPYRVVVP

SEQ ID NO: 1304 - protein, 285 aa, Homo sapiens
MEVPPPAPRSFLCRALCLFPRVFAAEAVTADSEVLEERQKRLPYVPEPYYPESGWDRLRELFGKDEQQRISKDLANICKTAATAGIIGWVYGGIPAFIHAKQQYIEQSQAEIYHNRFDAVQSAHRAATRGFIRYGWRWGWRTAVFVTIFNTVNTSLNVYRNKDALSHFVIAGAVTGSLFRINVGLRGLVAGGIIGALLGTPVGGLLMAFQKYSGETVQERKQKDRKALHELKLEEWKGRLQVTEHLPEKIESSLQEDEPENDAKKIEALLNLPRNPSVIDKQDKD

SEQ ID NO: 1305 - protein, 160 aa, Homo sapiens
MTLEELVACDNAAQKMQTVTAAVEELLVAAQRQDRLTVGVYESAKLMNVDPDSVVLCLLAIDEEEEDDIALQIHFTLIQSFCCDNDINIVRVSGMQRLAQLLGEPAETQGTTEARDLHCLLVTNPHTDAWKSHGLVEVASYCEESRGNNQWVPYISLQER

SEQ ID NO: 1306 - protein, 89 aa, Homo sapiens
MCDRKAVIKNADMSEEMQQDSVECATQALEKYNIEKDIAAHIKKEFDKKYNPTWHCIVGRNFGSYVTHETKHFIYFYLGQVAILLFKSG

SEQ ID NO: 1307 - protein, 280 aa, Homo sapiens
RSFSLSFSLLSPSEMMALGAAGATRVFVAMVAAALGGHPLLGVSATLNSVLNSNAIKNLPPPLGGAAGHPGSAVSAAPGILYPGGNKYQTIDNYQPYPCAEDEECGTDEYCASPTRGGDAGVQICLACRKRRKRCMRHAMCCPGNYCKNGICVSSDQNHFRGEIEETITESFGNDHSTLDGYSRRTTLSSKMYHTKGQEGSVCLRSSDCASGLCCARHFWSKICKPVLKEGQVCTKHRRKGSHGLEIFQRCYCGEGLSCRIQKDHHQASNSSRLHTCQRH

SEQ ID NO: 1308 - protein, 269 aa, Homo sapiens
MAAALFVLLGFALLGTHGASGAAGTVFTTVEDLGSKILLTCSLNDSATEVTGHRWLKGGVVLKEDALPGQKTEFKVDSDDQWGEYSCVFLPEPMGTANIQLHGPPRVKAVKSSEHINEGETAMLVCKSESVPPVTDWAWYKITDSEDKALMNGSESRFFVSSSQGRSELHIENLNMEADPGQYRCNGTSSKGSDQAIITLRVRSHLAALWPFLGIVAEVLVLVTIIFIYEKRRKPEDVLDDDDAGSAPLKSSGQHQNDKGKNVRQRNSS

SEQ ID NO: 1309 - protein, 580 aa, Homo sapiens
MAGTVRTACLVVAMLLSLDFPGQAQPPPPPPDATCHQVRSFFQRLQPGLKWVPETPVPGSDLQVCLPKGPTCCSRKMEEKYQLTARLNMEQLLQSASMELKFLIIQNAAVFQEAFEIVVRHAKNYTNAMFKNNYPSLTPQAFEFVGEFFTDVSLYILGSDINVDDMVNELFDSLFPVIYTQLMNPGLPDSALDINECLRGARRDLKVFGNFPKLIMTQVSKSLQVTRIFLQALNLGIEVINTTDHLKFSKDCGRMLTRMWYCSYCQGLMMVKPCGGYCNVVMQGCMAGVVEIDKYWREYILSLEELVNGMYRIYDMENVLLGLFSTIHDSIQYVQKNAGKLTTTIGKLCAHSQQRQYRSAYYPEDLFIDKKVLKVAHVEHEETLSSRRRELIQKLKSFISFYSALPGYICSHSPVAENDTLCWNGQELVERYSQKAARNGMKNQFNLHELKMKGPEPVVSQIIDKLKHINQLLRTMSMPKGRVLDKNLDEEGFESGDCGDDEDECIGGSGDGMIKVKNQLRFLAELAYDLDVDDAPGNSQQATPKDNEISTFHNLGNVHSPLKLLTSMAISVVCFFFLVH

SEQ ID NO: 1310 - protein, 986 aa, Homo sapiens
MPGVARLPLLLGLLLLPRPGRPLDLADYTYDLAEEDDSEPLNYKDPCKAAAFLGDIALDEEDLRAFQVQQAVDLRRHTARKSSIKAAVPGNTSTPSCQSTNGQPQRGACGRWRGRSRSRRAATSRPERVWPDGVIPFVIGGNFTGSQRAVFRQAMRHWEKHTCVTFLERTDEDSYIVFTYRPCGCCSYVGRRGGGPQAISIGKNCDKFGIVVHELGHVVGFWHEHTRPDRDRHVSIVRENIQPGQEYNFLKMEPQEVESLGETYDFDSIMHYARNTFSRGIFLDTIVPKYEVNGVKPPIGQRTRLSKGDIAQARKLYKCPACGETLQDSTGNFSSPEYPNGYSAHMHCVWRISVTPGEKIILNFTSLDLYRSRLCWYDYVEVRDGFWRKAPLRGRFCGSKLPEPIVSTDSRLWVEFRSSSNWVGKGFFAVYEAICGGDVKKDYGHIQSPNYPDDYRPSKVCIWRIQVSEGFHVGLTFQSFEIERHDSCAYDYLEVRDGHSESSTLIGRYCGYEKPDDIKSTSSRLWLKFVSDGSINKAGFAVNFFKEVDECSRPNRGGCEQRCLNTLGSYKCSCDPGYELAPDKRRCEAACGGFLTKLNGSITSPGWPKEYPPNKNCIWQLVAPTQYRISLQFDFFETEGNDVCKYDFVEVRSGLTADSKLHGKFCGSEKPEVITSQYNNMRVEFKSDNTVSKKGFKAHFFSDKDECSKDNGGCQQDCVNTFGSYECQCRSGFVLHDNKHDCKEAGCDHKVTSTSGTITSPNWPDKYPSKKECTWAISSTPGHRVKLTFMEMDIESQPECAYDHLEVFDGRDAKAPVLGRFCGSKKPEPVLATGSRMFLRFYSDNSVQRKGFQASHATECGGQVRADVKTKDLYSHAQFGDNNYPGGVDCEWVIVAEEGYGVELVFQTFEVEEETDCGYDYMELFDGYDSTAPRLGRYCGSGPPEEVYSAGDSVLVKFHSDDTITKKGFHLRYTSTKFQDTLHSRK

SEQ ID NO: 1311 - protein, 126 aa, Homo sapiens
MADEIAKAQVARPGGDTIFGKIIRKEIPAKIIFEDDRCLAFHDISPQAPTHFLVIPKKHISQISVAEDDDESLLGHLMIVGKKCAADLGLNKGYRMVVNEGSDGGQSVYHVHLHVLGGRQMHWPPG

SEQ ID NO: 1312 - protein, 263 aa, Homo sapiens
MALASVLERPLPVNQRGFFGLGGRADLLDLGPGSLSDGLSLAAPGWGVPEEPGIEMLHGTTTLAFKFRHGVIVAADSRATAGAYIASQTVKKVIEINPYLLGTMAGGAADCSFWERLLARQCRIYELRNKERISVAAASKLLANMVYQYKGMGLSMGTMICGWDKRGPGLYYVDSEGNRISGATFSVGSGSVYAYGVMDRGYSYDLEVEQAYDLARRAIYQATYRDAYSGGAVNLYHVREDGWIRVSSDNVADLHEKYSGSTP

SEQ ID NO: 1313 - protein, 422 aa, Homo sapiens [sequence omitted]

SEQ ID NO: 1314 - protein, 683 aa, Homo sapiens
MALFVRLLALALALALGPAATLAGPAKSPYQLVLQHSRLRGRQHGPNVCAVQKVIGTNRKYFTNCKQWYQRKICGKSTVISYECCPGYEKVPGEKGCPAALPLSNLYETLGVVGSTTTQLYTDRTEKLRPEMEGPGSFTIFAPSNEAWASLPAEVLDSLVSNVNIELLNALRYHMVGRRVLTDELKHGMTLTSMYQNSNIQIHHYPNGIVTVNCARLLKADHHATNGVVHLIDKVISTITNNIQQIIEIEDTFETLRAAVAASGLNTMLEGNGQYTLLAPTNEAFEKIPSETLNRILGDPEALRDLLNNHILKSAMCAEAIVAGLSVETLEGTTLEVGCSGDMLTINGKAIISNKDILATNGVIHYIDELLIPDSAKTLFELAAESDVSTAIDLFRQAGLGNHLSGSERLTLLAPLNSVFKDGTPPIDAHTRNLLRNHIIKDQLASKYLYHGQTLETLGGKKLRVFVYRNSLCIENSCIAAHDKRGRYGTLFTMDRVLTPPMGTVMDVLKGDNRFSMLVAAIQSAGLTETLNREGVYTVFAPTNEAFRALPPRERSRLLGDAKELANILKYHIGDEILVSGGIGALVRLKSLQGDKLEVSLKNNVVSVNKEPVAEPDIMATNGVVHVITNVLQPPANRPQERGDELADSALEIFKQASAFSRASQRSVRLAPVYQKLLERMKH

SEQ ID NO: 1315 - protein, 128 aa, Homo sapiens
MAGGKAGKDSGKAKAKAVSRSQRAGLQFPVGRIHRHLKTRTTSHGRVGATAAVYSAAILEYLTAEVLELAGNASKDLKVKRITPRHLQLAIRGDEELDSLIKATIAGGGVIPHIHKSLIGKKGQQKTA

SEQ ID NO: 1316 - protein, 188 aa, Homo sapiens
MSTMFADTLLIVFISVCTALLAEGITWVLVYRTDKYKRLKAEVEKQSKKLEKKKETITESAGRQQKKKIERQEEKLKNNNRDLSMVRMKSMFAIGFCFTALMGMFNSIFDGRVVAKLPFTPLSYIQGLSHRNLLGDDTTDCSFIFLYILCTMSIRQNIQKILGLAPSRAATKQAGGFLGPPPPSGKFS

SEQ ID NO: 1317 - protein, 703 aa, Homo sapiens
MLSAALRTLKHVLYYSRQCLMVSRNLGSVGYDPNEKTFDKILVANRGEIACRVIRTCKKMGIKTVAIHSDVDASSVHVKMADEAVCVGPAPTSKSYLNMDAIMEAIKKTRAQAVHPGYGFLSENKEFARCLAAEDVVFIGPDTHAIQAMGDKIESKLLAKKAEVNTIPGFDGVVKDAEEAVRIAREIGYPVMIKASAGGGGKGMRIAWDDEETRDGFRLSSQEAASSFGDDRLLIEKFIDNPRHIEIQVLGDKHGNALWLNERECSIQRRNQKVVEEAPSIFLDAETRRAMGEQAVALARAVKYSSAGTVEFLVDSKKNFYFLEMNTRLQVEHPVTECITGLDLVQEMIRVAKGYPLRHKQADIRINGWAVECRVYAEDPYKSFGLPSIGRLSQYQEPLHLPGVRVDSGIQPGSDISIYYDPMISKLITYGSDRTEALKRMADALDNYVIRGVTHNIALLREVIINSRFVKGDISTKFLSDVYPDGFKGHMLTKSEKNQLLAIASSLFVAFQLRAQHFQENSRMPVIKPDIANWELSVKLHDKVHTVVASNNGSVFSVEVDGSKLNVTSTWNLASPLLSVSVDGTQRTVQCLSREAGGNMSIQFLGTVYKVNILTRLAAELNKFMLEKVTEDTSSVLRSPMPGVVVAVSVKPGDAVAEGQEICVIEAMKMQNSMTAGKTGTVKSVHCQAGDTVGEGDLLVELE

SEQ ID NO: 1318 - protein, 126 aa, Homo sapiens
VRRRLSMRPKLVIIESDLERAEERAELSEGQVRQLEEQLRIMDQTLKALMAAEDKYSQKEDRYEEEIKVLSDKLKEAETRAEFAERSVTKLEKSIDDLEEKVAHAKEENLSMHQMLDQTLLELNNM

SEQ ID NO: 1319 - protein, 128 aa, Homo sapiens
MAGNLLSGAGRRLWDWVPLACRSFSLGVPRLIGIRLTLPPPKVVDRWNEKRAMFGVYDNIGILGNFEKHPKELIRGPIWLRGWKGNELQRCIRKRKMVGSRMFADDLHNLNKRIRYLYKHFNRHGKFR

SEQ ID NO: 1320 - protein, 151 aa, Homo sapiens
MAASSQGNFEGNFESLDLAEFAKKQPWWRKLFGQESGPSAEKYSVATQLFIGGVTGWCTGFIFQKVGKLAATAVGGGFFLLQLANHTGYIKVDWQRVEKDMKKAKEQLKIRKSNQIPTEVRSKAEEVVSFVKKNVLVTGGFFGGFLLGMAS

SEQ ID NO: 1321 - protein, 159 aa, Homo sapiens
MKKMLVGFLRTQHVWKPPTTVPSGTQQAPVFVEVALWNIPISCLLIALRELKKKLFKRRRVLNRERRLRHRVVGAVIDQGLITRHHLKKRASSARANITLSGKKRRKLLQQIRLAQKEKTAMEVEAPSKPARTSEPQLKRQKKTKAPQDVEMKDLEDES

SEQ ID NO: 1322 - protein, 233 aa, Homo sapiens
MVSMSFKRNRSDRFYSTRCCGCCHVRTGTIILGTWYMVVNLLMAILLTVEVTHPNSMPAVNIQYEVIGNYYSSERMADNACVLFAVSVLMFIISSMLVYGAISYQVGWLIPFFCYRLFDFVLSCLVAISSLTYLPRIKEYLDQLPDFPYKDDLLALDSSCLLFIVLVFFALFIIFKAYLINCVWNCYKYINNRNVPEIAVYPAFEAPPQYVLPTYEMAVKMPEKEPPPPYLPA

SEQ ID NO: 1323 - protein, 333 aa, Homo sapiens
MSGDEMIFDPTMSKKKKKKKKPFMLDEEGDTQTEETQPSETKEVEPEPTEDKDLEADEEDTRKKDASDDLDDLNFFNQKKKKKKTKKIFDIDEAEEGVKDLKIESDVQEPTEPEDDLDIMLGNKKKKKKNVKFPDEDEILEKDEALEDEDNKKDDGISFSNQTGPAWAGSERDYTYEELLNRVFNIMREKNPDMVAGEKRKFVMKPPQVVRVGTKKTSFVNFTDICKLLHRQPKHLLAFLLAELGTSGSIDGNNQLVIKGRFQQKQIENVLRRYIKEYVTCHTCRSPDTILQKDTRLYFLQCETCHSRCSVASIKTGFQAVTGKRAQLRAKAN

SEQ ID NO: 1324 - protein, 186 aa, Homo sapiens
MAVARAGVLGVQWLQRASRNVMPLGARTASHMTKDMFPGPYPRTPEERAAAAKKYNMRVEDYEPYPDDGMGYGDYPKLPDRSQHERDPWYSWDQPGLRLNWGEPMHWHLDMYNRNRVDTSPTPVSWHVMCMQLFGFLAFMIFMCWVGDVYPVYQPVGPKQYPYNNLYLERGGDPSKEPERVVHYEI

SEQ ID NO: 1325 - protein, 357 aa, Homo sapiens
MATPAVPVSAPPATPTPVPAAAPASVPAPTPAPAAAPVPAAAPASSSDPAAAAAATAAPGQTPASAQAPAQTPAPALPGPALPGPFPGGRVVRLHPVILASIVDSYERRNEGAARVIGTLLGTVDKHSVEVTNCFSVPHNESEDEVAVDMEFAKNMYELHKKVSPNELILGWYATGHDITEHSVLIHEYYSREAPNPIHLTVDTSLQNGRMSIKAYVSTLMGVPGRTMGVMFTPLTVKYAYYDTERIGVDLIMKTCFSPNRVIGLSSDLQQVGGASARIQDALSTVLQYAEDVLSGKVSADNTVGRFLMSLVNQVPKIVPDDFETMLNSNINDLLMVTYLANLTQSQIALNEKLVNL

SEQ ID NO: 1326 - protein, 184 aa, Homo sapiens [sequence omitted]

SEQ ID NO: 1327 - protein, 152 aa, Homo sapiens
MAVLSKEYGFVLLTGAASFIMVAHLAINVSKARKKYKVEYPIMYSTDPENGHIFNCIQRAHQNTLEVYPPFLFFLAVGGVYHPRIASGLGLAWIVGRVLYAYGYYTGEPSKRSRGALGSIALLGLVGTTVCSAFQHLGWVKSGLGSGPKCCH

SEQ ID NO: 1328 - protein, 277 aa, Homo sapiens [sequence omitted]

SEQ ID NO: 1329 - protein, 886 aa, Homo sapiens
DCCSGIWEAGSRKEVEMKGWYHGKLDRTIAEERLRQAGKSGSYLIRESDRRPGSFVLSFLSQMNVVNHFRIIAMCGDYYIGGRRFSSLSDLIGYYSHVSCLLKGEKLLYPVAPPEPVEDRRRVRAILPYTKVPDTDEISFLKGDMFIVHNELEDGWMWVTNLRTDEQGLIVEDLVEEVGREEDPHEGKIWFHGKISKQEAYNLLMTVGQVCSFLVRPSDNTPGDYSLYFRTNENIQRFKICPTPNNQFMMGGRYYNSIGDIIDHYRKEQIVEGYYLKEPVPMQDQEQVLNDTVDGKEIYNTIRRKTKDAFYKNIVKKGYLLKKGKGKRWKNLYFILEGSDAQLIYFESEKRATKPKGLIDLSVCSVYVVHDSLFGRPNCFQIVVQHFSEEHYIFYFAGETPEQAEDWMKGLQAFCNLRKSSPGTSNKRLRQVSSLVLHIEEAHKLPVKHFTNPYCNIYLNSVQVAKTHAREGQNPVWSEEFVFDDLPPDINRFEITLSNKTKKSKDPDILFMRCQLSRLQKGHATDEWFLLSSHIPLKGIEPGSLRVRARYSMEKIMPEEEYSEFKELILQKELHVVYALSHVCGQDRTLLASILLRIFLHEKLESLLLCTLNDREISMEDEATTLFRATTLASTLMEQYMKATATQFVHHALKDSILKIMESKQSCELSPSKLEKNEDVNTNLTHLLNILSELVEKIFMASEILPPTLRYIYGCLQKSVQHKWPTNTTMRTRVVSGFVFLRLICPAILNPRMFNIISDSPSPIAARTLILVAKSVQNLANLVEFGAKEPYMEGVNPFIKSNKHRMIMFLDELGNVPELPDTTEHSRTDLSRDLAALHEICVAHSDELRTLSNERGAQQHVLKKLLAITELLQQKQNQYTKTNDVR

SEQ ID NO: 1330 - protein, 440 aa, Homo sapiens
MGQSQSGGHGPGGGKKDDKDKKKKYEPPVPTRVGKKKKKTKGPDAASKLPLVTPHTQCRLKLLKLERIKDYLLMEEEFIRNQEQMKPLEEKQEEERSKVDDLRGTPMSVGTLEEIIDDNHAIVSTSVGSEHYVSILSFVDKDLLEPGCSVLLNHKVHAVIGVLMDDTDPLVTVMKVEKAPQETYADIGGLDNQIQEIKESVELPLTHPEYYEEMGIKPPKGVILYGPPGTGKTLLAKAVANQTSATFLRVVGSELIQKYLGDGPKLVRELFRVAEEHAPSIVFIDEIDAIGTKRYDSNSGGEREIQRTMLELLNQLDGFDSRGDVKVIMATNRIETLDPALIRPGRIDRKIEFPLPDEKTKKRIFQIHTSRMTLADDVTLDDLIMAKDDLSGADIKAICTEAGLMALRERRMKVTNEDFKKSKENVLYKKQEGTPEGLYL

SEQ ID NO: 1331 - protein, 418 aa, Homo sapiens
MQALVLLLCIGALLGHSSCQNPASPPEEGSPDPDSTGALVEEEDPFFKVPVNKLAAAVSNFGYDLYRVRSSTSPTTNVLLSPLSVATALSALSLGAEQRTESIIHRALYYDLISSPDIHGTYKELLDTVTAPQKNLKSASRIVFEKKLRIKSSFVAPLEKSYGTRPRVLTGNPRLDLQEINNWVQAQMKGKLARSTKEIPDEISILLLGVAHFKGQWVTKFDSRKTSLEDFYLDEERTVRVPMMSDPKAVLRYGLDSDLSCKIAQLPLTGSMSIIFFLPLKVTQNLTLIEESLTSEFIHDIDRELKTVQAVLTVPKLKLSYEGEVTKSLQEMKLQSLFDSPDFSKITGKPIKLTQVEHRAGFEWNEDGAGTTPSPGLQPAHLTFPLDYHLNQPFIFVLRDTDTGALLFIGKILDPRGP

SEQ ID NO: 1332 - protein, 308 aa, Homo sapiens
MPGQELRTVNGSQMLLVLLVLSWLPHGGALSLAEASRASFPGPSELHSEDSRFRELRKRYEDLLTRLRANQSWEDSNTDLVPAPAVRILTPEVRLGSGGHLHLRISRAALPEGLPEASRLHRALFRLSPTASRSWDVTRPLRRQLSLARPQAPALHLRLSPPPSQSDQLLAESSSARPQLELHLRPQAARGRRRARARNGDHCPLGPGRCCRLHTVRASLEDLGWADWVLSPREVQVTMCIGACPSQFRAANMHAQIKTSLHRLKPDTVPAPCCVPASYNPMVLIQKTDTGVSLQTYDDLLAKDCHCI

SEQ ID NO: 1333 - protein, 148 aa, Homo sapiens
MARALCRLPRRGLWLLLAHHLFMTTACQEANYGALLRELCLTQFQVDMEAVGETLWCDWGRTIRSYRELADCTWHMAEKLGCFWPNAEVDRFFLAVHGRYFRSCPISGRAVRDPPGSILYPFIVVPITVTLLVTALVVWQSKRTEGIV

SEQ ID NO: 1334 - protein, 266 aa, Homo sapiens
MVKVTFNSALAQKEAKKDEPKSGEEALIIPPDAVAVDCKDPDDVVPVGQRRAWCWCMCFGLAFMLAGVILGGAYLYKYFALQPDDVYYCGIKYIKDDVILNEPSADAPAALYQTIEENIKIFEEEEVEFISVPVPEFADSDPANIVHDFNKKLTAYLDLNLDKCYVIPLNTSIVMPPRNLLELLINIKAGTYLPQSYLIHEHMVITDRIENIDHLGFFIYRLCHDKETYKLQRRETIKGIQKREASNCFAIRHFENKFAVETLICS

SEQ ID NO: 1335 - protein, 93 aa, Homo sapiens [sequence omitted]

SEQ ID NO: 1336 - protein, 176 aa, Homo sapiens
MAASTDMAGLEESFRKFAIHGDPKASGQEMNGKNWAKLCKDCKVADGKSVTGTDVDIVFSKVKGKSARVINYEEFKKALEELATKRFKGKSKEEAFDAICQLVAGKEPANVGVTKAKTGGAVDRLTDTSRYTGSHKERFDESGKGKGIAGRQDILDDSGYVSAYKNAGTYDAKVKK

SEQ ID NO: 1337 - protein, 157 aa, Homo sapiens
MATPPKRRAVEATGEKVLRYETFISDVLQRDLRKVLDHRDKVYEQLAKYLQLRNVIERLQEAKHSELYMQVDLGCNFFVDTVVPDTSRIYVALGYGFFLELTLAEALKFIDRKSSLLTELSNSLTKDSMNIKAHIHMLLEGLRELQGLQNFPEKPHH

SEQ ID NO: 1338 - protein, 172 aa, Homo sapiens
MPGIVELPTLEELKVDEVKISSAVLKAAAHHYGAQCDKPNKEFMLCRWEEKDPRRCLEEGKLVNKCALDFFRQIKRHCAEPFTEYWTCIDYTGQQLFRHCRKQQAKFDECVLDKLGWVRPDLGELSKVTKVKTDRPLPENPYHSRPRPDPSPEIEGDLQPATHGSRFYFWTK

SEQ ID NO: 1339 - protein, 148 aa, Homo sapiens
MASVVLALRTRTAVTSLLSPTPATALAVRYASKKSGGSSKNLGGKSSGRRQGIKKMEGHYVHAGNIIATQRHFRWHPGAHVGVGKNKCLYALEEGIVRYTKEVYVPHPRNTEAVDLITRLPKGAVLYKTFVHVVPAKPEGTFKLVAML

SEQ ID NO: 1340 - protein, 564 aa, Homo sapiens
MSYPADDYESEAAYDPYAYPSDYDMHTGDPKQDLAYERQYEQQTYQVIPEVIKNFIQYFHKTVSDLIDQKVYELQASRVSSDVIDQKVYEIQDIYENSWTKLTERFFKNTPWPEAEAIAPQVGNDAVFLILYKELYYRHIYAKVSGGPSLEQRFESYYNYCNLFNYILNADGPAPLELPNQWLWDIIDEFIYQFQSFSQYRCKTAKKSEEEIDFLRSNPKIWNVHSVLNVLHSLVDKSNINRQLEVYTSGGDPESVAGEYGRHSLYKMLGYFSLVGLLRLHSLLGDYYQAIKVLENIELNKKSMYSRVPECQVTTYYYVGFAYLMMRRYQDAIRVFANILLYIQRTKSMFQRTTYKYEMINKQNEQMHALLAIALTMYPMRIDESIHLQLREKYGDKMLRMQKGDPQVYEELFSYSCPKFLSPVVPNYDNVHPNYHKEPFLQQLKVFSDEVQQQAQLSTIRSFLKLYTTMPVAKLAGFLDLTEQEFRIQLLVFKHKMKNLVWTSGISALDGEFQSASEVDFYIDKDMIHIADTKVARRYGDFFIRQIHKFEELNRTLKKMGQRP

SEQ ID NO: 1341 - protein, 534 aa, Homo sapiens
MRPDDKYHEKQAQVEATKLKQKVEALSPGDRQQIYEKGLELRSQQSKPQDASCLPALKVSDIEPTIPVTELDVVLTAGDIPVQYCAQPTNGMVYFRAFSSLNTLPEELRPYVPLFCSVLTKLGCGLLDYREQAQQIELKTGGMSASPHVLPDDSHMDTYEQGVLFSSLCLDRNLPDMMQLWSEIFNNPCFEEEEHFKVLVKMTAQELANGIPDSGHLYASIRAGRTLTPAGDLQETFSGMDQVRLMKRIAEMTDIKPILRKLPRIKKHLLNGDNMRCSVNATPQQMPQTEKAVEDFLRSIGRSKKERRPVRPHTVEKPVPSSSGGDAHVPHGSQVIRKLVMEPTFKPWQMKTHFLMPFPVNYVGECIRTVPYTDPDHASLKILARLMTAKFLHTEIREKGGAYGGGAKLSHNGIFTLYSYRDPNTIETLQSFGKAVDWAKSGKFTQQDIDEAKLSVFSTVDAPVAPSDKGMDHFLYGLSDEMKQAHREQLFAVSHDKLLAVSDRYLGTGKSTHGLAILGPENPKIAKDPSWIIR

SEQ ID NO: 1342 - protein, 381 aa, Homo sapiens
MTVARPSVPAALPLLGELPRLLLLVLLCLPAVWGDCGLPPDVPNAQPALEGRTSFPEDTVITYKCEESFVKIPGEKDSVICLKGSQWSDIEEFCNRSCEVPTRLNSASLKQPYITQNYFPVGTVVEYECRPGYRREPSLSPKLTCLQNLKWSTAVEFCKKKSCPNPGEIRNGQIDVPGGILFGATISFSCNTGYKLFGSTSSFCLISGSSVQWSDPLPECREIYCPAPPQIDNGIIQGERDHYGYRQSVTYACNKGFTMIGEHSIYCTVNNDEGEWSGPPPECRGKSLTSKVPPTVQKPTTVNVPTTEVSPTSQKTTTKTTTPNAQATRSTPVSRTTKHFHETTPNKGSGTTSGTTRLLSGHTCFTLTGLLGTLVTMGLLT

SEQ ID NO: 1343 - protein, 162 aa, Homo sapiens
MRAPIPEPKPGDLIEIFRPFYRHWAIYVGDGYVVHLAPPSEVAGAGAASVMSALTDKAIVKKELLYDVAGSDKYQVNNKHDDKYSPLPCSKIIQRAEELVGQEVLYKLTSENCEHFVNELRYGVARSDQVRDVIIAASVAGMGLAAMSLIGVMFSRNKRQKQ

SEQ ID NO: 1344 - protein, 154 aa, Homo sapiens
MTTTTTFKGVDPNSRNSSRVLRPPGGGSNFSLGFDEPTEQPVRKNKMASNIFGTPEENQASWAKSAGAKSSGGREDLESSGLQRRNSSEASSGDFLDLKGEGDIHENVDTDLPGSLGQSEEKPVPAAPVPSPVAPAPVPSRRNPPGGKSSLVLG

SEQ ID NO: 1345 - protein, 91 aa, Homo sapiens
MGLEDEQKMLTESGDPEEEEEEEEELVDPLTTVREQCEQLEKCVKARERLELCDERVSSRSHTEEDCTEELFDFLHARDHCVAHKLFNNLK

SEQ ID NO: 1346 - protein, 83 aa, Homo sapiens
MSFFQLLMKRKELIPLVVFMTVAAGGASSFAVYSLWKTDVILDRKKNPEPWETVDPTVPQKLITINQQWKPIEELQNVQRVTK

SEQ ID NO: 1347 - protein, 140 aa, Homo sapiens [sequence omitted]

SEQ ID NO: 1348 - protein, 270 aa, Homo sapiens
MACRPRSPPRHQSRCDGDASPPSPARWSLGRKRRADGRRWRPEDAEEAEHRGAERRPESFTTPEGPKPRSRCSDWASAVEEDEMRTRVNKEMARYKRKLLINDFGRERKSSSGSSDSKESMSTVPADFETDESVLMRRQKQINYGKNTIAYDRYIKEVPRHLRQPGIHPKTPNKFKKYSRRSWDQQIKLWKVALHFWDPPAEEGCDLQEIHPVDLESAESSSEPQTSSQDDFDVYSGTPTKVRHMDSQVEDEFDLEACLTEPLRDFSAMS

SEQ ID NO: 1349 - protein, 406 aa, Homo sapiens
MALDGPEQMELEEGKAGSGLRQYYLSKIEELQLIVNDKSQNLRRLQAQRNELNAKVRLLREELQLLQEQGSYVGEVVRAMDKKKVLVKVHPEGKFVVDVDKNIDINDVTPNCRVALRNDSYTLHKILPNKVDPLVSLMMVEKVPDSTYEMIGGLDKQIKEIKEVIELPVKHPELFEALGIAQPKGVLLYGPPGTGKTLLARAVAHHTDCTFIRVSGSELVQKFIGEGARMVRELFVMAREHAPSIIFMDEIDSIGSSRLEGGSGGDSEVQRTMLELLNQLDGFEATKNIKVIMATNRIDILDSALLRPGRIDRKIEFPPPNEEARLDILKIHSRKMNLTRGINLRKIAELMPGASGAEVKGVCTEAGMYALRERRVHVTQEDFEMAVAKVMQKDSEKNMSIKKLWK

SEQ ID NO: 1350 - protein, 177 aa, Homo sapiens [sequence omitted]

SEQ ID NO: 1351 - protein, 96 aa, Homo sapiens
MAEVEETLKRLQSQKGVQGIIVVNTEGIPIKSTMDNPTTTQYASLMHSFILKARSTVRDIDPQNDLTFLRIRSKKNEIMVAPDKDYFLIVIQNPTE

SEQ ID NO: 1352 - protein, 579 aa, Homo sapiens
MSASSLLEQRPKGQGNKVQNGSVHQKDGLNDDDFEPYLSPQARPNNAYTAMSDSYLPSYYSPSIGFSYSLGEAAWSTGGDTAMPYLTSYGQLSNGEPHFLPDAMFGQPGALGSTPFLGQHGFNFFPSGIDFSAWGNNSSQGQSTQSSGYSSNYAYAPSSLGGAMIDGQSAFANETLNKAPGMNTIDQGMAALKLGSTEVASNVPKVVGSAVGSGSITSNIVASNSLPPATIAPPKPASWADIASKPAKQQPKLKTKNGIAGSSLPPPPIKHNMDIGTWDNKGPVAKAPSQALVQNIGQPTQGSPQPVGQQANNSPPVAQASVGQQTQPLPPPPPQPAQLSVQQQAAQPTRWVAPRNRGSGFGHNGVDGNGVGQSQAGSGSTPSEPHPVLEKLRSINNYNPKDFDWNLKHGRVFIIKSYSEDDIHRSIKYNIWCSTEHGNKRLDAAYRSMNGKGPVYLLFSVNGSGHFCGVAEMKSAVDYNTCAGVWSQDKWKGRFDVRWIFVKDVPNSQLRHIRLENNENKPVTNSRDTQEVPLEKAKQVLKIIASYKHTTSIFDDFSHYEKRQEEEESVKKERQGRGK

SEQ ID NO: 1353 - protein, 433 aa, Homo sapiens
MPDYLGADQRKTKEDEKDDKPIRALDEGDIALLKTYGQSTYSRQIKQVEDDIQQLLKKINELTGIKESDTGLAPPALWDLAADKQTLQSEQPLQVARCTKIINADSEDPKYIINVKQFAKFVVDLSDQVAPTDIEEGMRVGVDRNKYQIHIPLPPKIDPTVTMMQVEEKPDVTYSDVGGCKEQIEKLREVVETPLLHPERFVNLGIEPPKGVLLFGPPGTGKTLCARAVANRTDACFIRVIGSELVQKYVGEGARMVRELFEMARTKKACLIFFDEIDAIGGARFDDGAGGDNEVQRTMLELINQLDGFDPRGNIKVLMATNRPDTLDPALMRPGRLDRKIEFSLPDLEGRTHIFKIHARSMSVERDIRFELLARLCPNSTGAEIRSVCTEAGMFAIRARRKIATEKDFLEAVNKVIKSYAKFSATPRYMTYN

SEQ ID NO: 1354 - protein, 322 aa, Homo sapiens
MVSVINTVDTSHEDMIHDAQMDYYGTRLATCSSDRSVKIFDVRNGGQILIADLRGHEGPVWQVAWAHPMYGNILASCSYDRKVIIWREENGTWEKSHEHAGHDSSVNSVCWAPHDYGLILACGSSDGAISLLTYTGEGQWEVKKINNAHTIGCNAVSWAPAVVPGSLIDHPSGQKPNYIKRFASGGCDNLIKLWKEEEDGQWKEEQKLEAHSDWVRDVAWAPSIGLPTSTIASCSQDGRVFIWTCDDASSNTWSPKLLHKFNDVVWHVSWSITANILAVSGGDNKVTLWKESVDGQWVCISDVNKGQGSVSASVTEGQQNEQ

SEQ ID NO: 1355 - protein, 153 aa, Homo sapiens
MASYFDEHDCEPSDPEQETRTNMLLELARSLFNRMDFEDLGLVVDWDHHLPPPAAKTVVENLPRTVIRGSQAELKCPVCLLEFEEEETAIEMPCHHLFHSSCILPWLSKTNSCPLCRYELPTDDDTYEEHRRDKARKQQQQHRLENLHGAMYT

SEQ ID NO: 1356 - protein, 163 aa, Homo sapiens
MGSTWGSPGWVRLALCLTGLVLSLYALHVKAARARDRDYRALCDVGTAISCSRVFSSRWGRGFGLVEHVLGQDSILNQSNSIFGCIFYTLQLLLGCLRTRWASVLMLLSSLVSLAGSVYLAWILFFVLYDFCIVCITTYAINVSLMWLSFRKVQEPQGKAKRH

SEQ ID NO: 1357 - protein, 405 aa, Homo sapiens
MENDPQEAESEMALDAEFLDVYKNCNGVVMMFDITKQWTFNYILRELPKVPTHVPVCVLGNYRDMGEHRVILPDDVRDFIDNLDRPPGSSYFRYAESSMKNSFGLKYLHKFFNIPFLQLQRETLLRQLETNQLDMDATLEELSVQQETEDQNYGIFLEMMEARSRGHASPLAANGQSPSPGSQSPVVPAGAVSTGSSSPGTPQPAPQLPLNAAPPSSVPPVPPSEALPPPACPSAPAPRRSIISRPPPWGWRLRGALGRRGQWPPWGGGRACHCLGRHLPLYHRLCRCPVAAVCASELEEAGHWWSPGWALQVLGLQAQCEPALQEGRGQLASARLGGHPGPLGAEPPVFLRDVTEAQEGPVRVCLQRLGRGRLAVGCALPRHLLALRAHLGPQHAYGSASGREP

SEQ ID NO: 1358 - protein, 497 aa, Homo sapiens
MSQDGASQFQEVIRQELELSVKKELEKILTTASSHEFEHTKKDLDGFRKLFHRFLQEKGPSVDWGKIQRPPEDSIQPYEKIKARGLPDNISSVLNKLVVVKLNGGLGTSMGCKGPKSLIGVRNENTFLDLTVQQIEHLNKTYNTDVPLVLMNSFNTDEDTKKILQKYNHCRVKIYTFNQSRYPRINKESLLPVAKDVSYSGENTEAWYPPGHGDIYASFYNSGLLDTFIGEGKEYIFVSNIDNLGATVDLYILNHLMNPPNGKRCEFVMEVTNKTRADVKGGTLTQYEGKLRLVEIAQVPKAHVDEFKSVSKFKIFNTNNLWISLAAVKRLQEQNAIDMEIIVNAKTLDGGLNVIQLETAVGAAIKSFENSLGINVPRSRFLPVKTTSDLLLVMSNLYSLNAGSLTMSEKREFPTVPLVKLGSSFTKVQDYLRRFESIPDMLELDHLTVSGDVTFGKNVSLKGTVIIIANHGDRIDIPPGAVLENKIVSGNLRILDH

SEQ ID NO: 1359 - protein, 160 aa, Homo sapiens
MQPASAKWYDRRDYVFIEFCVEDSKDVNVNFEKSKLTFSCLGGSDNFKHLNEIDLFHCIDPNDSKHKRTDRSILCCLRKGESGQSWPRLTKERAKLNWLSVDFNNWKDWEDDSDEDMSNFDRFSEMMNNMGGDEDVDLPEVDGADDDSQDSDDEKMPDLE

SEQ ID NO: 1360 - protein, 419 aa, Homo sapiens
MNKHQKPVLTGQRFKTRKRDEKEKFEPTVFRDTLVQGLNEAGDDLEAVAKFLDSTGSRLDYRRYADTLFDILVAGSMLAPGGTRIDDGDKTKMTNHCVFSANEDHETIRNYAQVFNKLIRRYKYLEKAFEDEMKKLLLFLKAFSETEQTKLAMLSGILLGNGTLPATILTSLFTDSLVKEGIAASFAVKLFKAWMAEKDANSVTSSLRKANLDKRLLELFPVNRQSVDHFAKYFTDAGLKELSDFLRVQQSLGTRKELQKELQERLSQECPIKEVVLYVKEEMKRNDLPETAVIGLLWTCIMNAVEWNKKEELVAEQALKHLKQYAPLLAVFSSQGQSELILLQKVQEYCYDNIHFMKAFQKIVVLFYKADVLSEEAILKWYKEAHVAKGKSVFLDQMKKFVEWLQNAEEESESEGEEN

SEQ ID NO: 1361 - protein, 187 aa, Homo sapiens
  misc_feature (1)...(187): Xaa = any amino acid or nothing
SKMWLFKKKKKKKKKKKKKNTHNKTQDKHKNTQPRPNQQQHEKHHQQNNKREGGPPRQPPGEEPTQTHTPYCNTTPTQRGXYKKQTAAATHNTGGEQTTDTRRRTGNTTLAAGNNRGTTQQDQRQNNQSASGPPSPSGTPSRQSHNTTRRNXSRNRDRRRQQIPEHGRNKSTAAHKHNNKTAHHSHN

SEQ ID NO: 1362 - protein, 117 aa, Homo sapiens [sequence omitted]

SEQ ID NO: 1363 - protein, 101 aa, Homo sapiens
MGFVKVVKNKAYFKRYQVKFRRRREGKTDYYARKRLVIQDKNKYNTPKYRMIVRVTNRDIICQIAYARIEGDMIVCAAYAHELPKYGVKVGLTNYAAAKWR

SEQ ID NO: 1364 - protein, 106 aa, Homo sapiens
MPFLDIQKRFGLNIDRWLTIQSGEQPYKMAGRCHAFEKEWIECAHGIGYTRAEKECKIEYDDFVECLLRQKTMRRAGTIRKQRDKLIKEGKYTPPPHHIGKGEPRP

SEQ ID NO: 1365 - protein, 417 aa, Homo sapiens
MAGPFSRLLSARPGLRLLALAGAGSLAAGFLLRPEPVRAASERRRLYPPSAEYPDLRKHNNCMASHLTPAVYARLCDKTTPTGWTLDQCIQTGVDNPGHPFIKTVGMVAGDEETYEVFADLFDPVIQERHNGYDPRTMKHTTDLDASKIRSGYFDERYVLSSRVRTGRSIRGLSLPPACTRAERREVERVVVDALSGLKGDLAGRYYRLSEMTEAEQQQLIDDHFLFDKPVSPLLTAAGMARDWPDARGIWHNNEKSFLIWVNEEDHTRVISMEKGGNMKRVFERFCRGLKEVERLIQERGWEFMWNERLGYILTCPSNLGTGLRAGVHIKLPLLSKDSRFPKILENLRLQKRGTGGVDTAATGGVFDISNLDRLGKSEVELVQLVIDGVNYLIDCERRLERGQDIRIPTPVIHTKH

SEQ ID NO: 1366 - protein, 154 aa, Homo sapiens
MAQSINITELNLPQLEMLKNQLDQEVEFLSTSIAQLKVVQTKYVEAKDCLNVLNKSNEGKELLVPLTSSMYVPGKLHDVEHVLIDVGTGYYVEKTAEDAKDFFKRKIDFLTKQMEKIQPALQEKHAMKQAVMEMMSQKIQQLTALGAAQATAKA

SEQ ID NO: 1367 - protein, 190 aa, Homo sapiens
MATHHTLWMGLALLGVLGDLQAAPEAQVSVQPNFQQDKFLGRWFSAGLASNSSWLREKKAALSMCKSVVAPATDGGLNLTSTFLRKNQCETRTMLLQPAGSLGSYSYRSPHWGSTYSVSVVETDYDQYALLYSQGSKGPGEDFRMATLYSRTQTPRAELKEKFTAFCKAQGFTEDTIVFLPQTDKCMTEQ

SEQ ID NO: 1368 - protein, 258 aa, Homo sapiens
MEEMKKTAIRLPKGKQKPIKTEWNSRCVLFTYFQGDISSVVDEHFSRALSNIKSPQELTPSSQSEGVMLKNDDSMSPNQWRYSSPWTKPQPEVPVTNRAANCNLHVPGPMAVNQFSPSLARRASVRPGELWHFSSLAGTSSLEPGYSHPFPARHLVPEPQPDGKREPLLSLLQQDRCLARPQESAARENGNPGQIAGSTGLLFNLPPGSVHYKKLYVSRGSASTSLPNETLSELETPGKYSLTPPNHWGHPHRYLQHL

SEQ ID NO: 1369 - protein, 147 aa, Homo sapiens
MSSEPPPPPQPPTHQASVGLLDTPRSRERSPSPLRGNVVPSPLPTRRTRTFSATVRASQGPVYKGVCKCFCRSKGHGFITPADGGPDIFLHISDVEGEYVPVEGDEVTYKMCSIPPKNEKLQAVEVVITHLAPGTKHETWSGHVISS

SEQ ID NO: 1370 - protein, 114 aa, Homo sapiens
MASVSELACIYSALILHDDEVTVTEDKINALIKAAGVNVEPFWPGLFAKALANVNIGSLICNVGAGGPAPAAGAAPAGGPAPSTAAAPAEEKKVEAKKEESEESDDDMGFGLFD

SEQ ID NO: 1371 - protein, 105 aa, Homo sapiens
MVKQIESKTAFQEALDAAGDKLVVVDFSATWCGPCKMIKPFFHSLSEKYSNVIFLEVDVDDCQDVASECEVKCMPTFQFFKKGQKVGEFSGANKEKLEATINELV

SEQ ID NO: 1372 - protein, 211 aa, Homo sapiens
AATSESACRPCAAEPAARMPNWGGGKKCGVCQKTVYFAEEVQCEGNSFHKSCFLCMVCKKNLDSTTVAVHGEEIYCKSCYGKKYGPKGYGYGQGAGTLSTDKGESLGIKHEEAPGHRPTTNPNASKFAQKIGGSERCPRCSQAVYAAEKVIGAGKSWHKACFRCAKCGKGLESTTLADKDGEIYCKGCYAKNFGPKGFGFGQGAGALVHSE

SEQ ID NO: 1373 - protein, 519 aa, Homo sapiens
MAAEREPPPLGDGKPTDFEDLEDGEDLFTSTVSTLESSPSSPEPASLPAEDISANSNGPKPTEVVLDDDREDLFAEATEEVSLDSPEREPILSSEPSPAVTPVTPTTLIAPRIESKSMSAPVIFDRSREEIEEEANGDIFDIEIGVSDPEKVGDGMNAYMAYRVTTKTSLSMFSKSEFSVKRRFSDFLGLHSKLASKYLHVGYIVPPAPEKSIVGMTKVKVGKEDSSSTEFVEKRRAALERYLQRTVKHPTLLQDPDLRQFLESSELPRAVNTQALSGAGILRMVNKAADAVNKMTIKMNESDAWFEEKQQQFENLDQQLRKLHVSVEALVCHRKELSANTAAFAKSAAMLGNSEDHTALSRALSQLAEVEEKIDQLHQEQAFADFYMFSELLSDYIRLIAAVKGVFDHRMKCWQKWEDAQITLLKKREAEAKMMVANKPDKIQQAKNEIREWEAKVQQGERDFEQISKTIRKEVGRFEKERVKDFKTVIIKYLESLVQTQQQLIKYWEAFLPEAKAIA

SEQ ID NO: 1374 - protein, 293 aa, Homo sapiens
MASNVTNKTDPRSMNSRVFIGNLNTLVVKKSDVEAIFSKYGKIVGCSVHKGFAFVQYVNERNARAAVAGEDGRMIAGQVLDINLAAEPKVNRGKAGVKRSAAEMYGSSFDLDYDFQRDYYDRMYSYPARVPPPPPIARAVVPSKRQRVSGNTSRRGKSGFNSKSGQRGSSKSGKLKGDDLQAIKKELTQIKQKVDSLLENLEKIEKEQSKQAVEMKNDKSEEEQSSSSVKKDETNVKMESEGGADDSAEEGDLLDDDDNEDRGDDQLELIKDDEKEAEEGEDDRDSANGEDDS

SEQ ID NO: 1375 - protein, 416 aa, Homo sapiens
MSEADGLRQRRPLRPQVVTDDDGQAPEAKDGSSFSGRVFRVTFLMLAVSLTVPLLGAMMLLESPIDPQPLSFKEPPLLLGVLHPNTKLRQAERLFENQLVGPESIAHIGDVMFTGTADGRVVKLENGEIETIARFGSGPCKTRDDEPVCGRPLGIRAGPNGTLFVADAYKGLFEVNPWKREVKLLLSSETPIEGKNMSFVNDLTVTQDGRKIYFTDSSSKWQRRDYLLLVMEGTDDGRLLEYDTVTREVKVLLDQLRFPNGVQLSPAEDFVLVAETTMARIRRVYVSGLMKGGADLFVENMPGFPDNIRPSSSGGYWVGMSTIRPNPGFSMLDFLSERPWIKRMIFKLFSQETVMKFVPRYSLVLELSDSGAFRRSLHDPDGLVATYISEVHEHDGHLYLGSFRSPFLCRLSLQAV

SEQ ID NO: 1376 - protein, 621 aa, Homo sapiens [sequence omitted]

SEQ ID NO: 1377 - protein, 1023 aa, Homo sapiens
MGKGVGRDKYEPAAVSEQGDKKGKKGKKDRDMDELKKEVSMDDHKLSLDELHRKYGTDLSRGLTSARAAEILARDGPNALTPPPTTPEWIKFCRQLFGGFSMLLWIGAILCFLAYSIQAATEEEPQNDNLYLGVVLSAVVIITGCFSYYQEAKSSKIMESFKNMVPQQALVIRNGEKMSINAEEVVVGDLVEVKGGDRIPADLRIISANGCKVDNSSLTGESEPQTRSPDFTNENPLETRNIAFFSTNCVEGTARGIVVYTGDRTVMGRIATLASGLEGGQTPIAAEIEHFIHIITGVAVFLGVSFFILSLILEYTWLEAVIFLIGIIVANVPEGLLATVTVCLTLTAKRMARKNCLVKNLEAVETLGSTSTICSDKTGTLTQNRMTVAHMWFDNQIHEADTTENQSGVSFDKTSATWLALSRIAGLCNRAVFQANQENLPILKRAVAGDASESALLKCIELCCGSVKEMRERYAKIVEIPFNSTNKYQLSIHKNPNTSEPQHLLVMKGAPERILDRCSSILLHGKEQPLDEELKDAFQNAYLELGGLGERVLGFCHLFLPDEQFPEGFQFDTDDVNFPIDNLCFVGLISMIDPPRAAVPDAVGKCRSAGIKVIMVTGDHPITAKAIAKGVGIISEGNETVEDIAARLNIPVSQVNPRDAKACVVHGSDLKDMTSEQLDDILKYHTEIVFARTSPQQKLIIVEGCQRQGAIVAVTGDGVNDSPALKKADIGVAMGIAGSDVSKQAADMILLDDNFASIVTGVEEGRLIFDNLKKSIAYTLTSNIPEITPFLIFIIANIPLPLGTVTILCIDLGTDMVPAISLAYEQAESDIMKRQPRNPKTDKLVNERLISMAYGQIGMIQALGGFFTYFVILAENGFLPIHLLGLRVDWDDRWINDVEDSYGQQWTYEQRKIVEFTCHTAFFVSIVVVQWADLVICKTRRNSVFQQGMKNKILIFGLFEETALAAFLSYCPGMGVALRMYPLKPTWWFCAFPYSLLIFVYDEVRKLIIRRRPGGWVEKETYY

SEQ ID NO: 1378 - protein, 151 aa, Homo sapiens
MPRGSRSRTSRMAPPASRAPQMRAAPRPAPVAQPPAAAPPSAVGSSAAAPRQPGLMAQMATTAAGVAVGSAVGHTLGHAITGGFSGGSNAEPARPDITYQEPQGTQPAQQQQPCLYEIKQFLECAQNQGDIKLCEGFNEVLKQCRLANGLA

SEQ ID NO: 1379 - protein, 347 aa, Homo sapiens
MAQSRDGGNPFAEPSELDNPFQDPAVIQHRPSRQYATLDVYNPFETREPPPAYEPPAPAPLPPPSAPSLQPSRKLSPTEPKNYGSYSTQASAAAATAELLKKQEELNRKAEELDRRERELQHAALGGTATRQNNWPPLPSFCPVQPCFFQDISMEIPQEFQKTVSTMYYLWMCSTLALLLNFLACLASFCVETNNGAGFGLSILWVLLFTPCSFVCWYRPMYKAFRSDSSFNFFVFFFIFFVQDVLFVLQAIGIPGWGFSGWISALVVPKGNTAVSVLMLLVALLFTGIAVLGIVMLKRIHSLYRRTGASFQKAQQEFAAGVFSNPAVRTAAANAAAGAAENAFRAP

SEQ ID NO: 1380 - protein, 169 aa, Homo sapiens
MLATRVFSLVGKRAISTSVCVRAHESVVKSEDFSLPAYMDRRDHPLPEVAHVKHLSASQKALKEKEKASWSSLSMDEKVELYRIKFKESFAEMNRGSNEWKTVVGGAMFFIGFTALVIMWQKHYVYGPLPQSFDKEWVAKQTKRMLDMKVNPIQGLASKWDYEKNEWKK

SEQ ID NO: 1381 - protein, 329 aa, Homo sapiens
MTTQQIDLQGPGPWGFRLVGGKDFEQPLAISRVTPGSKAALANLCIGDVITAIDGENTSNMTHLEAQNRIKGCTDNLTLTVARSEHKVWSPLVTEEGKRHPYKMNLASEPQEVLHIGSAHNRSAMPFTASPASSTTARVITNQYNNPAGLYSSENISNFNNALESKTAASGVEANSRPLDHAQPPSSLVIDKESEVYKMLQEKQELNEPPKQSTSFLVLQEILESEEKGDPNKPSGFRSVKAPVTKVAASIGNAQKLPMCDKCGTGIVGVFVKLRDRHRHPECYVCTDCGTNLKQKGHFFVEDQIYCEKHARERVTPPEGYEVVTVFPK

SEQ ID NO: 1382 - protein, 261 aa, Homo sapiens
MAGDSEQTLQNHQQPNGGEPFLIGVSGGTASGKSSVCAKIVQLLGQNEVDYRQKQVVILSQDSFYRVLTSEQKAKALKGQFNFDHPDAFDNELILKTLKEITEGKTVQIPVYDFVSHSRKEETVTVYPADVVLFEGILAFYSQEVRDLFQMKLFVDTDADTRLSRRVLRDISERGRDLEQILSQYITFVKPAFEEFCLPTKKYADVIIPRGADNLVAINLIVQHIQDILNGGPSKRQTNGCLNGYTPSRKRQASESSSRPH

SEQ ID NO: 1383 - protein, 240 aa, Homo sapiens
  misc_feature (1)...(240): Xaa = any amino acid or nothing
ARGIQACKPAGAARQRQDRRGAXSSDPGGARGDAGCRDPVTAXEVLQSTRFXQACIMREYKLVVLGSGGVGKSALTVQFVQGIFVEKYDPTIEDSYRKQVEVDAQQCMLEILDTAGTEQFTAMRDLYMKNGQGFALVYSITAQSTFNDLQDLREQILRVKDTDDVPMILVGNKCDLEDERVVGKEQGQNLARQWNNCAFLESSAKSKINVNEIFYDLVRQINRKTPVPGKARKKSSCQLL

SEQ ID NO: 1384 - protein, 185 aa, Homo sapiens
RNRSANGCKAQEAILGRKMHWGTLCGFLWLWPYLFYVQAVPIQKVQDDTKTLIKTIVTRINDISHTQSVSSKQKVTGLDFIPGLHPILTLSKMDQTLAVYQQILTSMPSRNVIQISNDLENLRDLLHVLAFSKSCHLPWASGLETLDSLGGVLEASGYSTEVVALSRLQGSLQDMLWQLDLSPGC

SEQ ID NO: 1385 - protein, 125 aa, Homo sapiens [sequence omitted]

SEQ ID NO: 1386 - protein, 411 aa, Homo sapiens
MATTATMATSGSARKRLLKEEDMTKVEFETSEEVDVTPTFDTMGLREDLLRGIYAYGFEKPSAIQQRAIKQIIKGRDVIAQSQSGTGKTATFSISVLQCLDIQVRETQALILAPTRELAVQIQKGLLALGDYMNVQCHACIGGTNVGEDIRKLDYGQHVVAGTPGRVFDMIRRRSLRTRAIKMLVLDEADEMLNKGFKEQIYDVYRYLPPATQVVLISATLPHEILEMTNKFMTDPIRILVKRDELTLEGIKQFFVAVEREEWKFDTLCDLYDTLTITQAVIFCNTKRKVDWLTEKMREANFTVSSMHGDMPQKERESIMKEFRSGASRVLISTDVWARGLDVPQVSLIINYDLPNNRELYIHRIGRSGRYGRKGVAINFVKNDDIRILRDIEQYYSTQIDEMPMNVADLI

SEQ ID NO: 1387 - protein, 349 aa, Homo sapiens
MSKSKDDAPHELESQFILRLPPEYASTVRRAVQSGHVNLKDRLTIELHPDGRHGIVRVDRVPLASKLVDLPCVMESLKTIDKKTFYKTADICQMLVSTVDGDLYPPVEEPVASTDPKASKKKDKDKEKKFIWNHGITLPLKNVRKRRFRKTAKKKYIESPDVEKEVKRLLSTDAEAVSTRWEIIAEDETKEAENQGLDISSPGMSGHRQGHDSLEHDELREIFNDLSSSSEDEDETQHQDEEDINIIDTEEDLERQLQDKLNESDEQHQENEGTNQLVMGIQKQIDNMKGKLQETQDRAKRQEDLIMKVENLALKNRFQAVLDELKQKEDREKEQLSSLQEELESLLEK

SEQ ID NO: 1388 - protein, 317 aa, Homo sapiens
MFQAAERPQEWAMEGPRDGLKKERLLDDRHDSGLDSMKDEEYEQMVKELQEIRLEPQEVPRGSEPWKQQLTEDGDSFLHLAIIHEEKALTMEVIRQVKGDLAFLNFQNNLQQTPLHLAVITNQPEIAEALLGAGCDPELRDFRGNTPLHLACEQGCLASVGVLTQSCTTPHLHSILKATNYNGHTCLHLASIHGYLGIVELLVSLGADVNAQEPCNGRTALHLAVDLQNPDLVSLLLKCGADVNRVTYQGYSPYQLTWGRPSTRIQQQLGQLTLENLQMLPESEDEESYDTESEFTEFTEDELPYDDCVFGGQRLTL

SEQ ID NO: 1389 - protein, 407 aa, Homo sapiens [sequence omitted]

SEQ ID NO: 1390 - protein, 886 aa, Homo sapiens
MGQKLKQRLRLDVGREICRQYPLFCFLLLCLSAASLLLNRYIHILMIFWSFVAGVVTFYCSLGPDSLLPNIFFTIKYKPKQLGLQELFPQGHSCAVCGKVKCKRHRPSLLLENYQPWLDLKISSKVDASLSEVDIPSIITKKLLKAAMKHIEVIVKARQKVKNTEFLQQAALEEYGPELHVALRSRRDELHYLRKLTELLFPYILPPKATDCRSLTLLIREILSGSVFLPSLDFLADPDTVNHLLIIFIDDSPPEKATEPASPLVPFLQKFAEPRNKKPSVLKLELKQIREQQDLLFRFMNFLKQEGAVHVLQFCLTVEEFNDRILRPELSNDEMLSLHEELQKIYKTYCLDESIDKIRFDPFIVEEIQRIAEGPYIDVVKLQTMRCLFEAYEHVLSLLENVFTPMFCHSDEYFRQLLRGAESPTRNSKLNRNTQKRGESFGISRIGSKIKGVFKSTTMEGAMLPNYGVAEGEDDFIEEGIVVMEDDSPVEAVSTPNTPRNLAAWKISIPYVDFFEDPSSERKEKKERIPVFCIDVERNDRRAVGHEPEHWSVYRRYLEFYVLESKLTEFHGAFPDAQLPSKRIIGPKNYEFLKSKREEFQEYLQKLLQHPELSNSQLLADFLSPNGGETQFLDKILPDVNLGKIIKSVPGKLMKEKGQHLEPFIMNFINSCESPKPKPSRPELTILSPTSENNKKLFNDLFKNNANRAENTERKQNQNYFMEVMTVEGVYDYLMYVGRVVFQVPDWLHHLLMGTRILFKNTLEMYTDYYLQCKLEQLFQEHRLVSLITLLRDAIFCENTEPRSLQDKQKGAKQTFEEMMNYIPDLLVKCIGEETKYESIRLLFDGLQQPVLNKQLTYVLLDIVIQELFPELNKVQKEVTSVTSWM

SEQ ID NO: 1391 - protein, 113 aa, Homo sapiens
MSAIQNLHSFDPFADASKGDDLLPAGTEDYIHIRIQQRNGRKTLTTVQGIADDYDKKKLVKAFKKKFACNGTVIEHPEYGEVIQLQGDQRKNICQFLVEIGLAKDDQLKVHGF

SEQ ID NO: 1392 - protein, 437 aa, Homo sapiens
MASVAVDPQPSVVTRVVNLPLVSSTYDLMSSAYLSTKDQYPYLKSVCEMAENGVKTITSVAMTSALPIIQKLEPQIAVANTYACKGLDRIEERLPILNQPSTQIVANAKGAVTGAKDAVTTTVTGAKDSVASTITGVMDKTKGAVTGSVEKTKSVVSGSINTVLGSRMMQLVSSGVENALTKSELLVEQYLPLTEEELEKEAKKVEGFDLVQKPSYYVRLGSLSTKLHSRAYQQALSRVKEAKQKSQQTISQLHSTVHLIEFARKNVYSANQKIQDAQDKLYLSWVEWKRSIGYDDTDESHCAEHIESRTLAIARNLTQQLQTTCHTLLSNIQGVPQNIQDQAKHMGVMAGDIYSVFRNAASFKEVSDSLLTSSKGQLQKMKESLDDVMDYLVNNTPLNWLVGPFYPQLTESQNAQDQGAEMDKSSQETQRSEHKTH

SEQ ID NO: 1393 - protein, 188 aa, Homo sapiens
MDVNIAPLRAWDDFFPGSDRFARPDFRDISKWNNRVVSNLLYYQTNYLVVAAMMISIVGFLSPFNMILGGIVVVLVFTGFVWAAHNKDVLRRMKKRYPTTFVMVVMLASYFLISMFGGVMVFVFGITFPLLLMFIHASLRLRNLKNKLENKMEGIGLKRTPMGIVLDALEQQEEGINRLTDYISKVKE

SEQ ID NO: 1394 - protein, 70 aa, Homo sapiens [sequence omitted]

SEQ ID NO: 1395 - protein, 540 aa, Homo sapiens
IPMALPYHIFLFTVLLPSFTLTAPPPCRCMTSSSPYQEFLWRMQRPGNIDAPSYRSLSKGTPTFTAHTHMPRNCYHSATLCMHANTHYWTGKMINPSCPGGLGVTVCWTYFTQTGMSDGGGVQDQAREKHVKEVISQLTRVHGTSSPYKGLDLSKLHETLRTHTRLVSLFNTTLTGLHEVSAQNPTNCWICLPLNFRPYVSIPVPEQWNNFSTEINTTSVLVGPLVSNLEITHTSNLTCVKFSNTTYTTNSQCIRWVTPPTQIVCLPSGIFFVCGTSAYRCLNGSSESMCFLSFLVPPMTIYTEQDLYSYVISKPRNKRVPILPFVIGAGVLGALGTGIGGITTSTQFYYKLSQELNGDMERVADSLVTLQDQLNSLAAVVLQNRRALDLLTAERGGTCLFLGEECCYYVNQSGIVTEKVKEIRDRIQRRAEELRNTGPWGLLSQWMPWILPFLGPLAAIILLLLFGPCIFNLLVNFVSSRIEAVKLQMEPKMQSKTKIYRRPLDRPASPRSDVNDIKGTPPEEISAAQPLLRPNSAGSS

SEQ ID NO: 1396 - protein, 359 aa, Homo sapiens
MKATIILLLLAQVSWAGPFQQRGLFDFMLEDEASGIGPEVPDDRDFEPSLGPVCPFRCQCHLRVVQCSDLGLDKVPKDLPPDTTLLDLQNNKITEIKDGDFKNLKNLHALILVNNKISKVSPGAFTPLVKLERLYLSKNQLKELPEKMPKTLQELRAHENEITKVRKVTFNGLNQMIVIELGTNPLKSSGIENGAFQGMKKLSYIRIADTNITSIPQGLPPSLTELHLDGNKISRVDAASLKGLNNLAKLGLSFNSISAVDNGSLANTPHLRELHLDNNKLTRVPGGLAEHKYIQVVYLHNNNISVVGSSDFCPPGHNTKKASYSGVSLFSNPVQYWEIQPSTFRCVYVRSAIQLGNYK

SEQ ID NO: 1397 - protein, 156 aa, Homo sapiens
MQIFVKTLTGKTITLEVEPSDTIENVKAKIQDKEGIPPDQQRLIFAGKQLEDGRTLSDYNIQKESTLHLVLRLRGGAKKRKKKSYTTPKKNKHKRKKVKLAVLKYYKVDENGKISRLRRECPSDECGAGVFMASHFDRHYCGKCCLTYCFNKPEDK

SEQ ID NO: 1398 - protein, 235 aa, Homo sapiens
MDPARPLGLSILLLFLTEAALGDAAQEPTGNNAEICLLPLDYGPCRALLLRYYYDRYTQSCRQFLYGGCEGNANNFYTWEACDDACWRIEKVPKVCRLQVSVDDQCEGSTEKYFFNLSSMTCEKFFSGGCHRNRIENRFPDEATCMGFCAPKKIPSFCYSPKDEGLCSANVTRYYFNPRYRTCDAFTYTGCGGNDNNFVSREDCKRACAKALKKKKKMPKLRFASRIRKIRKKQF

SEQ ID NO: 1399 - protein, 261 aa, Homo sapiens
MSRRYDSRTTIFSPEGRLYQVEYAMEAIGHAGTCLGILANDGVLLAAERRNIHKLLDEVFFSEKIYKLNEDMACSVAGITSDANVLTNELRLIAQRYLLQYQEPIPCEQLVTALCDIKQAYTQFGGKRPFGVSLLYIGWDKHYGFQLYQSDPSGNYGGWKATCIGNNSAAAVSMLKQDYKEGEMTLKSALALAIKVLNKTMDVSKLSAEKVEIATLTRENGKTVIRVLKQKEVEQLIKKHEEEEAKAEREKKEKEQKEKDK

SEQ ID NO: 1400 - protein, 256 aa, Homo sapiens
MLSRVVLSAAATAAPSLKNAAFLGPGVLQATRTFHTGQPHLVPVPPLPEYGGKVRYGLIPEEFFQFLYPKTGVTGPYVLGTGLILYALSKEIYVISAETFTALSVLGVMVYGIKKYGPFVADFADKLNEQKLAQLEEAKQASIQHIQNAIDTEKSQQALVQKRHYLFDVQRNNIAMALEVTYRERLYRVYKEVKNRLDYHISVQNMMRRKEQEHMINWVEKHVVQSISTQQEKETIAKCIADLKLLAKKAQAQPVM

SEQ ID NO: 1401 - protein, 389 aa, Homo sapiens
MADPRDKALQDYRKKLLEHKEIDGRLKELREQLKELTKQYEKSENDLKALQSVGQIVGEVLKQLTEEKFIVKATNGPRYVVGCRRQLDKSKLKPGTRVALDMTTLTIMRYLPREVDPLVYNMSHEDPGNVSYSEIGGLSEQIRELREVIELPLTNPELFQRVGIIPPKGCLLYGPPGTGKTLLARAVASQLDCNFLKVVSSSIVDKYIGESARLIREMFNYARDHQPCIIFMDEIDAIGGRRFSEGTSADREIQRTLMELLNQMDGFDTLHRVKMIMATNRPDTLDPALLRPGRLDRKIHIDLPNEQARLDILKIHAGPITKHGEIDYEAIVKLSDGFNGADLRNVCTEAGMFAIRADHDFVVQEDFMKAVRKVADSKKLESKLDYKPV

SEQ ID NO: 1402 - protein, 348 aa, Homo sapiens
MGARGAPSRRRQAGRRLRYLPTGSFPFLLLLLLLCIQLGGGQKKKENLLAEKVEQLMEWSSRRSIFRMNGDKFRKFIKAPPRNYSMIVMFTALQPQRQCSVCRQANEEYQILANSWRYSSAFCNKLFFSMVDYDEGTDVFQQLNMNSAPTFMHFPPKGRPKRADTFDLQRIGFAAEQLAKWIADRTDVHIRVFRPPNYSGTIALALLVSLVGGLLYLRRNNLEFIYNKTGWAMVSLCIVFAMTSGQMWNHIRGPPYAHKNPHNGQVSYIHGSSQAQFVAESHIILVLNAAITMGMVLLNEAATSKGDVGKRRIICLVGLGLVVFFFSFLLSIFRSKYHGYPYSDLDFE

SEQ ID NO: 1403 - protein, 263 aa, Homo sapiens
MRPGAPGPLWPLPWGALAWAVGFVSSMGSGNPAPGGVCWLQQGQEATCSLVLQTDVTRAECCASGNIDTAWSNLTHPGNKINLLGFLGLVHCLPCKDSCDGVECGPGKACRMLGGRPRCECAPDCSGLPARLQVCGSDGATYRDECELRAARCRGHPDLSVMYRGRCRKSCEHVVCPRPQSCVVDQTGSAHCVVCRAAPCPVPSSPGQELCGNNNVTYISSCHMRQATCFLGRSIGVRHAGSCAGTPEEPPGGESAEEEENFV

SEQ ID NO: 1404 - protein, 115 aa, Homo sapiens
MRYVASYLLAALGGNSSPSAKDIKKILDSVGIEADDDRLNKVISELNGKNIEDVIAQGIGKLASVPAGGAVAVSAAPGSAAPAAGSAPAAAEEKKDEKKEESEESDDDMGFGLFD

SEQ ID NO: 1405 - protein, 84 aa, Homo sapiens
RSKVWNLPLMERSFVWLSCLDSDSCNLTFRLGEVESHACSPSLLWNLLTQYLPPGAGHILRTYNFPVLSCVSSCHLIGGKMPEN

SEQ ID NO: 1406 - protein, 113 aa, Homo sapiens
MADVEDGEETCALASHSGSSGSKSGGDKMFSLKKWNAVAMWSWDVECDTCAICRVQVMDACLRCQAENKQEDCVVVWGECNHSFHNCCMSLWVKQNNRCPLCQQDWVVQRIGK

SEQ ID NO: 1407 - protein, 228 aa, Homo sapiens
MASEELQKDLEEVKVLLEKATRKRVRDALTAEKSKIETEIKNKMQQKSQKKAELLDNEKPAAVVAPITTGYTVKISNYGWDQSDKFVKIYITLTGVHQVPTENVQVHFTERSFDLLVKNLNGKSYSMIVNNLLKPISVEGSSKKVKTDTVLILCRKKVENTRWDYLTQVEKECKEKEKPSYDTETDPSEGLMNVLKKIYEDGDDDMKRTINKAWVESREKQAKGDTEF

SEQ ID NO: 1408 - protein, 142 aa, Homo sapiens
MIRFILIQNRAGKTRLAKWYMQFDDDEKQKLIEEVHAVVTVRDAKHTNFVEFRNFKIIYRRYAGLYFCICVDVNDNNLAYLEAIHNFVEVLNEYFHNVCELDLVFNFYKVYTVVDEMFLAGEIRETSQTKVLKQLLMLQSLE

SEQ ID NO: 1409 - protein, 645 aa, Homo sapiens
MRPRKAFLLLLLLGLVQLLAVAGAEGPDEDSSNRENAIEDEEEEEEEDDDEEEDDLEVKEENGVLVLNDANFDNFVADKDTVLLEFYAPWCGHCKQFAPEYEKIANILKDKDPPIPVAKIDATSASVLASRFDVSGYPTIKILKKGQAVDYEGSRTQEEIVAKVREVSQPDWTPPPEVTLVLTKENFDEVVNDADIILVEFYAPWCGHCKKLAPEYEKAAKELSKRSPPIPLAKVDATAETDLAKRFDVSGYPTLKIFRKGRPYDYNGPREKYGIVDYMIEQSGPPSKEILTLKQVQEFLKDGDDVIIIGVFKGESDPAYQQYQDAANNLREDYKFHHTFSTEIAKFLKVSQGQLVVMQPEKFQSKYEPRSHMMDVQGSTQDSAIKDFVLKYALPLVGHRKVSNDAKRYTRRPLVVVYYSVDFSFDYRAATQFWRSKVLEVAKDFPEYTFAIADEEDYAGEVKDLGLSESGEDVNAAILDESGKKFAMEPEEFDSDTLREFVTAFKKGKLKPVIKSQPVPKNNKGPVKVVVGKTFDSIVMDPKKDVLIEFYAPWCGHCKQLEPVYNSLAKKYKGQKGLVIAKMDATANDVPSDRYKVEGFPTIYFAPSGDKKNPVKFEGGDRDLEHLSKFIEEHATKLSRTKEEL

SEQ ID NO: 1410 - protein, 225 aa, Homo sapiens [sequence omitted]

SEQ ID NO: 1411 - protein, 515 aa, Homo sapiens
MAWPYFLDCHRYFTREDEGCYDPLEKLRGGLEADEALPSGLPPTFIRFSHHSYAQMVRVLRRMASRCAHVARTYSIGRSFDGRELLVIEFSSRPGQHELMEPEVKLIGNIHGNEVAGREMLIYLAQYLCSEYLLGNPRIQRLLNTTRIHLLPSMNPDGYEVAAAEGAGYNGWTSGRQNAQNLDLNRNFPDLTSEYYRLAETRGARSDHIPIPQHYWWGKVAPETKAIMKWMQTIPFVLSASLHGGDLVVSYPFDFSKHPQEEKMFSPTPDEKMFKLLSRAYADVHPMMMDRSENRCGGNFLKRGSIINGADWYSFTGGMSDFNYLHTNCFEITVELGCVKFPPEEALYTLWQHNKESLLNFVETVHRGIKGVVTDKFGKPVKNARISVKGIRHDITTAPDGDYWRLLPPGIHIVIAQAPGYAKVIKKVIIPARMKRAGRVDFILQPLGMGPKNFIHGLRRTGPHDPLGGASSLGEATEPDPLRARRQPSADGSKPWWWSYFTSLSTHRPRWLLKY

SEQ ID NO: 1412 - protein, 703 aa, Homo sapiens
MERAAPSRRVPLPLLLLGGLALLAAGVDADVLLEACCADGHRMATHQKDCSLPYATESKECRMVQEQCCHSQLEELHCATGISLANEQDRCATPHGDNASLEATFVKRCCHCCLLGRAAQAQGQSCEYSLMVGYQCGQVFRACCVKSQETGDLDVGGLQETDKIIEVEEEQEDPYLNDRCRGGGPCKQQCRDTGDEVVCSCFVGYQLLSDGVSCEDVNECITGSHSCRLGESCINTVGSFRCQRDSSCGTGYELTEDNSCKDIDECESGIHNCLPDFICQNTLGSFRCRPKLQCKSGFIQDALGNCIDINECLSISAPCPIGHTCINTEGSYTCQKNVPNCGRGYHLNEEGTRCVDVDECAPPAEPCGKGHRCVNSPGSFRCECKTGYYFDGISRMCVDVNECQRYPGRLCGHKCENTLGSYLCSCSVGFRLSVDGRSCEDINECSSSPCSQECANVYGSYQCYCRRGYQLSDVDGVTCEDIDECALPTGGHICSYRCINIPGSFQCSCPSSGYRLAPNGRNCQDIDECVTGIHNCSINETCFNIQGAFRCLAFECPENYRRSAATLQQEKTDTVRCIKSCRPNDVTCVFDPVHTISHTVISLPTFREFTRPEEIIFLRAITPPHPASQANIIFDITEGNLRDSFDIIKRYMDGMTVGVVRQVRPIVGPFHAVLKLEMNYVVGGVVSHRNVVNVRIFVSEYWF

SEQ ID NO: 1413 - protein, 482 aa, Homo sapiens
MVKLAKAGKNQGDPKKMAPPPKEVEEDSEDEEMSEDEEDDSSGEEVVIPQKKGKKAAATSAKKVVVSPTKKVAVATPAKKAAVTPGKKAAATPAKKTVTPAKAVTTPGKKGATPGKALVATPGKKGAAIPAKGAKNGKNAKKEDSDEEEDDDSEEDEEDDEDEDEDEDEIEPAAMKAAAAAPASEDEDDEDDEDDEDGKSKGIAYIEFKTEADAEKTFEEKQGTEIDGRSISLYYTGEKGQNQDYRGGKNSTWSGESKTLVLSNLSYSATEETLQEVFEKATFIKVPQNQNGKSKGYAFIEFASFEDAKEALNSCNKREIEGRAIRLELQGPRGSPNARSQPSKTLFVKGLSEDTTEETLKESFDGSVRARIVTDRETGSSKGFGFVDFNSEEDAKAAKEAMEDGEIDGNKVTLDWAKPKGEGGFGGRGGGRGGFGGRGGGRGGRGGFGGRGRGGFGGRGGFRGGRGGGGDHKPQGKKTKFE

SEQ ID NO: 1414 - protein, 151 aa, Homo sapiens [sequence omitted]

SEQ ID NO: 1415 - protein, 184 aa, Homo sapiens
INPPPPALPVLGASGAAAYGADMAKSKNHTTHNQSRKWHRNGIKKPRSQRYESLKGVDPKFLRNMRFAKKHNKKGLKKMQANNAKAMSARAEAIKALVKPKEVKPKIPKGVSRKLDRLAYIAHPKLGKRARARIAKGLRLCRPKAKAAKAKAKAKDQTKAQAAAPASVPAQAPKRTQAPTKASE

SEQ ID NO: 1416 - protein, 217 aa, Homo sapiens
MSSKVSRDTLYEAVREVLHGNQRKRRKFLETVELQISLKNYDPQKDKRFSGTVRLKSTPRPKFSVCVLGDQQHCDEAKAVDIPHMDIEALKKLNKNKKLVKKLAKKYDAFLASESLIKQIPRILGPGLNKAGKFPSLLTHNENMVAKVDEVKSTIKFQMKKVLCLAVAVGHVKMTDDELVYNIHLAVNFLVSLLKKNWQNVRALYIKSTMGKPQRLY

SEQ ID NO: 1417 - protein, 222 aa, Homo sapiens
MCLRLGGLSVGDFRKVLMKTGLVLVVLGHVSFITAALFHGTVLRYVGTPQDAVALQYCVVNILSVTSAIVVITSGIAAIVLSRYLPSTPLRWTVFSSSVACALLSLTCALGLLASIAMTFATQGKALLAACTFGSSELLALAPDCPFDPTRIYSSSLCLWGIALVLCVAENVFAVRCAQLTHQLLELRPWWGKSSHHMMRENPELVEGRDLLSCTSSEPLTL

SEQ ID NO: 1418 - protein, 338 aa, Homo sapiens
MSLSAFTLFLALIGGTSGQYYDYDFPLSIYGQSSPNCAPECNCPESYPSAMYCDELKLKSVPMVPPGIKYLYLRNNQIDHIDEKAFENVTDLQWLILDHNLLENSKIKGRVFSKLKQLKKLHINHNNLTESVGPLPKSLEDLQLTHNKITKLGSFEGLVNLTFIHLQHNRLKEDAVSAAFKGLKSLEYLDLSFNQIARLPSGLPVSLLTLYLDNNKISNIPDEYFKRFNALQYLRLSHNELADSGIPGNSFNVSSLVELDLSYNKLKNIPTVNENLENYYLEVNQLEKFDIKSFCKILGPLSYSKIKHLRLDGNRISETSLPPDMYECLRVANEVTLN

SEQ ID NO: 1419 - protein, 271 aa, Homo sapiens
MEALPLLAATTPDHGRHRRLLLLPLLLFLLPAGAVQGWETEERPRTREEECHFYAGGQVYPGEASRVSVADHSLHLSKAKISKPAPYWEGTAVIDGEFKELKLTDYRGKYLVFFFYPLDFTFVCPTEIIAFGDRLEEFRSINTEVVACSVDSQFTHLAWINTPRRQGGLGPIRIPLLSDLTHQISKDYGVYLEDSGHTLRGLFIIDDKGILRQITLNDLPVGRSVDETLRLVQAFQYTDKHGEVCPAGWKPGSETIIPDPAGKLKYFDKLN

SEQ ID NO: 1420 - protein, 182 aa, Homo sapiens
MRRMWATQGLAVALALSVLPGSRALRPGDCEVCISYLGRFYQDLKDRDVTFSPATIENELIKFCREARGKENRLCYYIGATDDAATKIINEVSKPLAHHIPVEKICEKLKKKDSQICELKYDKQIDLSTVDLKKLRVKELKKILDDWGETCKGCAEKSDYIRKINELMPKYAPKAASARTDL

SEQ ID NO: 1421 - protein, 189 aa, Homo sapiens
MVMLLLLLSALAGLFGAAEGQAFHLGKCPNPPVQENFDVNKYLGRWYEIEKIPTTFENGRCIQANYSLMENGKIKVLNQELRADGTVNQIEGEATPVNLTEPAKLEVKFSWFMPSAPYWILATDYENYALVYSCTCIIQLFHVDFAWILARNPNLPPETVDSLKNILTSNNIDVKKMTVTDQVNCPKLS

SEQ ID NO: 1422 - protein, 160 aa, Homo sapiens [sequence omitted]

SEQ ID NO: 1423 - protein, 119 aa, Homo sapiens [sequence omitted]

SEQ ID NO: 1424 - protein, 156 aa, Homo sapiens [sequence omitted]

SEQ ID NO: 1425 - protein, 409 aa, Homo sapiens
MLVVNNSVLFPPSGDRSEFPDVKILIAFISYKDFRDMNQTLGDNITVKMYSPSWPNFDYTMVVIFVIAVFTVALGGYWSGLVELENLKAVTTEDREMRKKKEEYLTFSPLTVVIFVVICCVMMVLLYFFYKWLVYVMIAIFCIASAMSLYNCLAALIHKIPYGQCTIACRGKNMEVRLIFLSGLCIAVAVVWAVFRNEDRWAWILQDILGIAFCLNLIKTLKLPNFKSCVILLGLLLLYDVFFVFITPFITKNGESIMVELAAGPFGNNEKLPVVIRVPKLIYFSVMSVCLMPVSILGFGDIIVPGLLIAYCRRFDVQTGSSYIYYVSSTVAYAIGMILTFVVLVLMKKGQPALLYLVPCTLITASVVAWRRKEMKKFWKGNSYQMMDHLDCATNEENPEISGEQIVQQ

SEQ ID NO: 1426 - protein, 168 aa, Homo sapiens
SVGDSSPPDSPGCHLAGPQGHARRPQARAAFMKPPAAQGSPAARRRPQPRPWTRAAEDLSDALCEFDAVLADFASPFHERHFHYEEHLERMKRRSSASVSDSSGFSDSESADSLYRNSFSFSDEKLNSPTDSTPALLSATVTPQKAKLGDTKELEAFIADLDKTLASM

SEQ ID NO: 1427 - protein, 537 aa, Homo sapiens
MTCHKRYKIQKKVREHHRKLRKEAKKRGHKKPRKDPGVPNSAPFKEALLREAELRKQRLEELKQQQKLDRQKELEKKRKLETNPDIKPSNVEPMEKEFGLCKTENKAKSGKQNSKKLYCQELKKVIEASDVVLEVLDARDPLGCRCPQVEEAIVQSGQKKLVLILNKSDLVPKENLESWLNYLKKELPTVVFRASTKPKDKGKITKRVKAKKNAAPFRSEVCFGKEGLWKLLGGFQETCSKAIRVGVIGFPNVGKSSIINSLKQEQMCNVGVSMGLTRSMQVVPLDKQITIIDSPSFIVSPLNSSSALALRSPASIEVVKPMEAASAILSQADARQVVLKYTVPGYRNSLEFFTVLAQRRGMHQKGGIPNVEGAAKLLWSEWTGASLAYYCHPPTSWTPPPYFNESIVVDMKSGFNLEELEKNNAQSIRAIKGPHLANSILFQSSGLTNGIIEEKDIHEELPKRKERKQEEREDDKDSDQETVDEEVDENSSGMFAAEETGEALSEETTAGEQSTRSFILDKIIEEDDAYDFSTDYV

SEQ ID NO: 1428 - protein, 108 aa, Homo sapiens
MVNLGLSRVDDAVAAKHPGLGEYAACQSHAFMKGVFTFVTGTGMAFGLQMFIQRKFPYPLQWSLLVAVVAGSVVSYGVTRVESEKCNNLWLFLETGQLPKDRSTDQRS

SEQ ID NO: 1429 - protein, 433 aa, Homo sapiens
MVWKVAVFLSVALGIGAVPIDDPEDGGKHWVVIVAGSNGWYNYRHQADACHAYQIIHRNGIPDEQIVVMMYDDIAYSEDNPTPGIVINRPNGTDVYQGVPKDYTGEDVTPQNFLAVLRGDAEAVKGIGSGKVLKSGPQDHVFIYFTDHGSTGILVFPNEDLHVKDLNETIHYMYKHKMYRKMVFYIEACESGSMMNHLPDNINVYATTAANPRESSYACYYDEKRSTYLGDWYSVNWMEDSDVEDLTKETLHKQYHLVKSHTNTSHVMQYGNKTISTMKVMQFQGMKRKASSPVPLPPVTHLDLTPSPDVPLTIMKRKLMNTNDLEESRQLTEEIQRHLDARHLIEKSVRKIVSLLAASEAEVEQLLSERAPLTGHSCYPEALLHFRTHCFNWHSPTYEYALRHLYVLVNLCEKPYPLHRIKLSMDHVCLGHY

SEQ ID NO: 1430 - protein, 212 aa, Homo sapiens
MNIFRLTGDLSHLAAIVILLLKIWKTRSCAGISGKSQLLFALVFTTRYLDLFTSFISLYNTSMKVIYLACSYATVYLIYLKFKATYDGNHDTFRVEFLVVPVGGLSFLVNHDFSPLEILWTFSIYLESVAILPQLFMISKTGEAETITTHYLFFLGLYRALYLVNWIWRFYFEGFFDLIAVVAGVVQTILYCDFFYLYITKVLKGKKLSLPA

SEQ ID NO: 1431 - protein, 1366 aa, Homo sapiens
MLSFVDTRTLLLLAVTLCLATCQSLQEETVRKGPAGDRGPRGERGPPGPPGRDGEDGPTGPPGPPGPPGPPGLGGNFAAQYDGKGVGLGPGPMGLMGPRGPPGAAGAPGPQGFQGPAGEPGEPGQTGPAGARGPAGPPGKAGEDGHPGKPGRPGERGVVGPQGARGFPGTPGLPGFKGIRGHNGLDGLKGQPGAPGVKGEPGAPGENGTPGQTGARGLPGERGRVGAPGPAGARGSDGSVGPVGPAGPIGSAGPPGFPGAPGPKGEIGAVGNAGPAGPAGPRGEVGLPGLSGPVGPPGNPGANGLTGAKGAAGLPGVAGAPGLPGPRGIPGPVGAAGATGARGLVGEPGPAGSKGESGNKGEPGSAGPQGPPGPSGEEGKRGPNGEAGSAGPPGPPGLRGSPGSRGLPGADGRAGVMGPPGSRGASGPAGVRGPNGDAGRPGEPGLMGPRGLPGSPGNIGPAGKEGPVGLPGIDGRPGPIGPAGARGEPGNIGFPGPKGPTGDPGKNGDKGHAGLAGARGAPGPDGNNGAQGPPGPQGVQGGKGEQGPAGPPGFQGLPGPSGPAGEVGKPGERGLHGEFGLPGPAGPRGERGPPGESGAAGPTGPIGSRGPSGPPGPDGNKGEPGVVGAVGTAGPSGPSGLPGERGAAGIPGGKGEKGEPGLRGEIGNPGRDGARGAHGAVGAPGPAGATGDRGEAGAAGPAGPAGPRGSPGERGEVGPAGPNGFAGPAGAAGQPGAKGERGAKGPKGENGVVGPTGPVGAAGPAGPNGPPGPAGSRGDGGPPGMTGFPGAAGRTGPPGPSGISGPPGPPGPAGKEGLRGPRGDQGPVGRTGEVGAVGPPGFAGEKGPSGEAGTAGPPGTPGPQGLLGAPGILGLPGSRGERGLPGVAGAVGEPGPLGIAGPPGARGPPGAVGSPGVNGAPGEAGRDGNPGNDGPPGRDGQPGHKGERGYPGNIGPVGAAGAPGPHGPVGPAGKHGNRGETGPSGPVGPAGAVGPRGPSGPQGIRGDKGEPGEKGPRGLPGLKGHNGLQGLPGIAGHHGDQGAPGSVGPAGPRGPAGPSGPAGKDGRTGHPGTVGPAGIRGPQGHQGPAGPPGPPGPPGPPGVSGGGYDFGYDGDFYRADQPRSAPSLRPKDYEVDATLKSLNNQIETLLTPEGSRKNPARTCRDLRLSHPEWSSGYYWIDPNQGCTMDAIKVYCDFSTGETCIRAQPENIPAKNWYRSSKDKKHVWLGETINAGSQFEYNVEGVTSKEMATQLAFMRLLANYASQNITYHCKNSIAYMDEETGNLKKAVILQGSNDVELVAEGNSRFTYTVLVDGCSKKTNEWGKTIIEYKTNKPSRLPFLDIAPLDIGGADHEFFVDIGPVCFK

SEQ ID NO: 1432 - protein, 189 aa, Homo sapiens
MASKRALVILAKGAEEMETVIPVDVMRRAGIKVTVAGLAGKDPVQCSRDVVICPDASLEDAKKEGPYDVVVLPGGNLGAQNLSESAAVKEILKEQENRKGLIAAICAGPTALLAHEIGFGSKVTTHPLAKDKMMNGGHYTYSENRVEKDGLILTSRGPGTSFEFALAIVEALNGKEVAAQVKAPLVLKD

SEQ ID NO: 1433 - protein, 115 aa, Homo sapiens
MNSGVCLCVLMAVLAAGALTQPVPPADPAGSGLQRAEEAPRRQLRVSQRTDGESRAHLGALLARYIQQARKAPSGRMSIVKNLQNLDPSHRISDRDYMGWMDFGRRSAEEYEYPS

SEQ ID NO: 1434 - protein, 133 aa, Homo sapiens [sequence omitted]

SEQ ID NO: 1435 - protein, 277 aa, Homo sapiens
MSKSLKKLVEESREKNQPEVDMSDRGISNMLDVNGLFTLSHITQLVLSHNKLTMVPPNIAELKNLEVLNFFNNQIEELPTQISSLQKLKHLNLGMNRLNTLPRGFGSLPALEVLDLTYNNLSENSLPGNFFYLTTLRALYLSDNDFEILPPDIGKLTKLQILSLRDNDLISLPKEIGELTQLKELHIQGNRLTVLPPELGNLDLTGQKQVFKAENNPWVTPIADQFQLGVSHVFEYIRSETYKYLYGRHMQANPEPPKKNNDKSKKISRKPLAAKNR

SEQ ID NO: 1436 - protein, 377 aa, Homo sapiens
MDSALSDPHNGSAEAGGPTNSTTRPPSTPEGIALAYGSLLLMALLPIFFGALRSVRCARGKNASDMPETITSRDAARFPIIASCTLLGLYLFFKIFSQEYINLLLSMYFFVLGILALSHTISPFMNKFFPASFPNRQYQLLFTQGSGENKEEIINYEFDTKDLVCLGLSSIVGVWYLLRKHWIANNLFGLAFSLNGVELLHLNNVSTGCILLGGLFIYDVFWVFGTNVMVTVAKFFEAPIKLVFPQDLLEKGLEANNFAMLGLGDVVIPGIFIALLLRFDISLKKNTHTYFYTSFAAYIFGLGLTIFIMHIFKHAQPALLYLVPACIGFPVLVALAKGEVTEMFSYEESNPKDPAAVTESKEGTEASASKGLEKKEK

SEQ ID NO: 1437 - protein, 430 aa, Homo sapiens
GTRKRTASATLSDPAAAAMQPSSLLPLALCLLAAPASALVRIPLHKFTSIRRTMSEVGGSVEDLIAKGPVSKYSQAVPAVTEGPIPEVLKNYMDAQYYGEIGIGTPPQCFTVVFDTGSSNLWVPSIHCKLLDIACWIHHKYNSDKSSTYVKNGTSFDIHYGSGSLSGYLSQDTVSVPCQSASSASALGGVKVERQVFGEATKQPGITFIAAKFDGILGMAYPRISVNNVLPVFDNLMQQKLVDQNIFSFYLSRDPDAQPGGELMLGGTDSKYYKGSLSYLNVTRKAYWQVHLDQVEVASGLTLCKEGCEAIVDTGTSLMVGPVDEVRELQKAIGAVPLIQGEYMIPCEKVSTLPAITLKLGGKGYKLSPEDYTLKVSQAGKTLCLSGFMGMDIPPPSGPLWILGDVFIGRYYTVFDRDNNRVGFAEAARL

SEQ ID NO: 1438 - protein, 253 aa, Homo sapiens
MMMKIPWGSIPVLMLLLLLGLIDISQAQLSCTGPPAIPGIPGIPGTPGPDGQPGTPGIKGEKGLPGLAGDHGEFGEKGDPGIPGNPGKVGPKGPMGPKGGPGAPGAPGPKGESGDYKATQKIAFSATRTINVPLRRDQTIRFDHVITNMNNNYEPRSGKFTCKVPGLYYFTYHASSRGNLCVNLMRGRERAQKVVTFCDYAYNTFQVTTGGMVLKLEQGENVFLQATDKNSLLGMEGANSIFSGFLLFPDMEA

SEQ ID NO: 1439 - protein, 193 aa, Homo sapiens
MAAIRKKLVIVGDGACGKTCLLIVFSKDQFPEVYVPTVFENYIADIEVDGKQVELALWDTAGQEDYDRLRPLSYPDTDVILMCFSIDSPDSLENIPEKWTPEVKHFCPNVPIILVGNKKDLRQDEHTRRELAKMKQEPVRSEEGRDMANRISAFGYLECSAKTKEGVREVFEMATRAGLQVRKNKRRRGCPIL

SEQ ID NO: 1440 - protein, 201 aa, Homo sapiens
MTEKAPEPHVEEDDDDELDSKLNYKPPPQKSLKELQEMDKDDESLIKYKKTLLGDGPVVTDPKAPNVVVTRLTLVCESAPGPITMDLTGDLEALKKETIVLKEGSEYRVKIHFKVNRDIVSGLKYVQHTYRTGVKVDKATFMVGSYGPRPEEYEFLTPVEEAPKGMLARGTYHNKSFFTDDDKQDHLSWEWNLSIKKEWTE

SEQ ID NO: 1441 - protein, 218 aa, Homo sapiens
MAELDPFGAPAGAPGGPALGNGVAGAGEEDPAAAFLAQQESEIAGIENDEAFAILDGGAPGPQPHGEPPGGPDAVDGVMNGEYYQESNGPTDSYAAISQVDRLQSEPESIRKWREEQMERLEALDANSRKQEAEWKEKAIKELEEWYARQDEQLQKTKANNRAAEEAFVNDIDESSPGTEWERVARLCDFNPKSSKQAKDVSRMRSVLISLKQAPLVH

SEQ ID NO: 1442 - protein, 111 aa, Homo sapiens
MSWRGRSTYRPRPRRSLQPPELIGAMLEPTDEEPKEEKPPTKSRNPTPDQKREDDQGAAEIQVPDLEADLQELCQTKTGDGCEGGTDVKGKILPKAEHFKMPEAGEGKSQV

SEQ ID NO: 1443 - protein, 215 aa, Homo sapiens
MGKGDPKKPRGKMSSYAFFVQTCREEHKKKHPDASVNFSEFSKKCSERWKTMSAKEKGKFEDMAKADKARYEREMKTYIPPKGETKKKFKDPNAPKRPPSAFFLFCSEYRPKIKGEHPGLSIGDVAKKLGEMWNNTAADDKQPYEKKAAKLKEKYEKDIAAYRAKGKPDAAKKGVVKAEKSKKKKEEEEDEEDEEDEEEEEDEEDEDEEEDDDDE

SEQ ID NO: 1444 - protein, 1125 aa, Homo sapiens
MASEEASLRALESLMTEFFHDCTTNERKREIEELLNNFAQQIGAWRFCLYFLSSTRNDYVMMYSLTVFENLINKMWLGVPSQDKMEIRSCLPKLLLAHHKTLPYFIRNKLCKVIVDIGRQDWPMFYHDFFTNILQLIQSPVTTPLGLIMLKTTSEELACPREDLSVARKEELRKLLLDQVQTVLGLLTGILETVWDKHSVTAATPPPSPTSGESGDLLSNLLQSPSSAKLLNQPIPILDVESEYICSLALECLAHLFSWIPLSASITPSLLTTIFHFARFGCDIRARKMASVNGSSQNCVSGQERGRLGVLAMSCINELMSKNCVPMEFEEYLLRMFQQTFYLLQKITKDNNAHTVKSRLEELDESYIEKFTDFLRLFVSVHLRRIESYSQFPVVEFLTLLFKYTFHQPTHEGYFSCLDIWTLFLDYLTSKIKSRLGDKEAVLNRYEDALVLLLTEVLNRIQFRYNQAQLEELDDETLDDDQQTEWQRYLRQSLEVVAKVMELLPTHAFSTLFPVLQDNLEVYLGLQQFIVTSGSGHRLNITAENDCRRLHCSLRDLSSLLQAVGRLAEYFIGDVFAARFNDALTVVERLVKVTLYGSQIKLYNIETAVPSVLKPDLIDVHAQSLAALQAYSHWLAQYCSEVHRQNTQQFVTLISTTMDAITPLISTKVQDKLLLSACHLLVSLATTVRPVFLISIPAVQKVFNRITDASALRLVDKAQVLVCRALSNILLLPWPNLPENEQQWPVRSINHASLISALSRDYRNLKPSAVAPQRKMPLDDTKLIIHQTLSVLEDIVENISGESTKSRQICYQSLQESVQVSLALFPAFIHQSDVTDEMLSFFLTLFRGLRVQMGVPFTEQIIQTFLNMFTREQLAESILHEGSTGCRVVEKFLKILQVVVQEPGQVFKPFLPSIIALCMEQVYPIIAERPSPDVKAELFELLFRTLHHNWRYFFKSTVLASVQRGIAEEQMENEPQFSAIMQAFGQSFLQPDIHLFKQNLFYLETLNTKQKLYHKKIFRTAMLFQFVNVLLQVLVHKSHDLLQEEIGIAIYNMASVDFDGFFAAFLPEFLTSCDGVDANQKSVLGRNFKMDRDLPSFTQNVHRLVNDLRYYRLCNDSLPPGTVKL

SEQ ID NO: 1445 - protein, 252 aa, Homo sapiens
MRAPLLPPAPVVLSLLILGSGHYAAGLDLNDTYSGKREPFSGDHSADGFEVTSRSEMSSGSEISPVSEMPSSSEPSSGADYDYSEEYDNEPQIPGYIVDDSVRVEQVVKPPQNKTESENTSDKPKRKKKGGKNGKNRRNRKKKNPCNAEFQNFCIHGECKYIEHLEAVTCKCQQEYFGERCGEKSMKTHSMIDSSLSKIALAAIAAFMSAVILTAVAVITVQLRRQYVRKYEGEAEERKKLRQENGNVHAIA

SEQ ID NO: 1446 - protein, 98 aa, Homo sapiens
MTGFLLPPASRGTRRSCSRSRKRQTRRRRNPSSFVASCPTLLPFACVPGASPTTLAFPPVVLTGPSTDGIPFALSLQRVPFVLPSPQVASLPLGHSRG

SEQ ID NO: 1447 - protein, 366 aa, Homo sapiens
MAAARHSTLDFMLGAKADGETILKGLQSIFQEQGMAESVHTWQDHGYLATYTNKNGSFANLRIYPHGLVLLDLQSYDGDAQGKEEIDSILNKVEERMKELSQDSTGRVKRLPPIVRGGAIDRYWPTADGRLVEYDIDEVVYDEDSPYQNIKILHSKQFGNILILSGDVNLAESDLAYTRAIMGSGKEDYTGKDVLILGGGDGGILCEIVKLKPKMVTMVEIDQMVIDGCKKYMRKTCGDVLDNLKGDCYQVLIEDCIPVLKRYAKEGREFDYVINDLTAVPISTSPEEDSTWEFLRLILDLSMKVLKQDGKYFTQGNCVNLTEALSLYEEQLGRLYCPVEFSKEIVCVPSYLELWVFYTVWKKAKP

SEQ ID NO: 1448 - protein, 198 aa, Homo sapiens
ESSGRPGATSLLSGSTQTSANSLRGQTRISRPGARPPPIGSSSSLSFKSSNFEKNMSFCQIRRDSLWSFLRRIELWSAPRAWARPSAGPVGWPGWPSQAAFLSGRGLARPGLHRRNSCWCRTRSPTPGMPEILQGPSRSSFPAHSSRARTLPRSQPIVAGGPRGWRPAWLASVSQTLTRGASSPLNPLTFKSFQVLVP

SEQ ID NO: 1449 - protein, 305 aa, Homo sapiens
MWPLVAALLLGSACCGSAQLLFNKTKSVEFTFCNDTVVIPCFVTNMEAQNTTEVYVKWKFKGRDIYTFDGALNKSTVPTDFSSAKIEVSQLLKGDASLKMDKSDAVSHTGNYTCEVTELTREGETIIELKYRVVSWFSPNENILIVIFPIFAILLFWGQFGIKTLKYRSGGMDEKTIALLVAGLVITVIVIVGAILFVPGEYSLKNATGLGLIVTSTGILILLHYYVFSTAIGLTSFVIAILVIQVIAYILAVVGLSLCIAACIPMHGPLLISGLSILALAQLLGLVYMKFVASNQKTIQPPRNN

SEQ ID NO: 1450 - protein, 152 aa, Homo sapiens
MMSPGLLLKPWWGGAQSEMGRNGMLEGCSVMSVGASRLGEGRVRPRAHSRRPVTRPRWRAAGPCTGTCQGGSHSRTLVLRLKAVSTTPTSANDLVQIKFRRDGGNRVVEALNLSEKRKDRKAQKQRDRRMKKKKRDMVVISISMTVTSSTLT

SEQ ID NO: 1451 - protein, 125 aa, Homo sapiens
MPRYELALILKAMQRPETAATLKRTIEALMDRGAIVRDLENLGERALPYRISAHSQQHNRGGYFLVDFYAPTAAVESMVEHLSRDIDVIRGNIVKHPLTQELKECEGIVPVPLAEKLYSTKKRKK

SEQ ID NO: 1452 - protein, 173 aa, Homo sapiens
MAAPSGGWNGVGASLWAALLLGAVALRPAEAVSEPTTVAFDVRPGGVVHSFSHNVGPGDKYTCMFTYASQGGTNEQWQMSLGTSEDHQHFTCTIWRPQGKSYLYFTQFKAEVRGAEIEYAMAYSKAAFERESDVPLKTEEFEVTKTAVAHRPGAFKAELSKLVIVAKASRTEL

SEQ ID NO: 1453 - protein, 158 aa, Homo sapiens [sequence omitted]

SEQ ID NO: 1454 - protein, 205 aa, Homo sapiens
MSSMNPEYDYLFKLLLIGDSGVGKSCLLLRFADDTYTESYISTIGVDFKIRTIELDGKTIKLQIWDTAGQERFRTITSSYYRGAHGIIVVYDVTDQESFNNVKQWLQEIDRYASENVNKLLVGNKCDLTTKKVVDYTTAKEFADSLGIPFLETSAKNATNVEQSFMTMAAEIKKRMGPGATAGGAEKSNVKIQSTPVKQSGGGCC

SEQ ID NO: 1455 - protein, 257 aa, Homo sapiens
MAQRMTTQLLLLLVWVAVVGEAQTRIAWARTELLNVCMNAKHHKEKPGPEDKLHEQCRPWRKNACCSTNTSQEAHKDVSYLYRFNWNHCGEMAPACKRHFIQDTCLYECSPNLGPWIQQVDQSWRKERVLNVPLCKEDCEQWWEDCRTSYTCKSNWHKGWNWTSGFNKCAVGAACQPFHFYFPTPTVLCNEIWTHSYKVSNYSRGSGRCIQMWFDPAQGNPNEEVARFYAAAMSGAGPWAAWPFLLSLALMLLWLLS

SEQ ID NO: 1456 - protein, 540 aa, Homo sapiens
MGTTARAALVLTYLAVASAASEGGFTATGQRQLRPEHFQEVGYAAPPSPPLSRSLPMDHPDSSQHGPPFEGQSQVQPPPSQEATPLQQEKLLPAQLPAEKEVGPPLPQEAVPLQKELPSLQHPNEQKEGTPAPFGDQSHPEPESWNAAQHCQQDRSQGGWGHRLDGFPPGRPSPDNLNQICLPNRQHVVYGPWNLPQSSYSHLTRQGETLNFLEIGYSRCCHCRSHTNRLECAKLVWEEAMSRFCEAEFSVKTRPHWCCTRQGEARFSCFQEEAPQPHYQLRACPSHQPDISSGLELPFPPGVPTLDNIKNICHLRRFRSVPRNLPATDPLQRELLALIQLEREFQRCCRQGNNHTCTWKAWEDTLDKYCDREYAVKTHHHLCCRHPPSPTRDECFARRAPYPNYDRDILTIDISRVTPNLMGHLCGNQRVLTKHKHIPGLIHNMTARCCDLPFPEQACCAEEEKLTFINDLCGPRRNIWRDPALCCYLSPGDEQVNCFNINYLRNVALVSGDTENAKGQGEQGSTGGTNISSTSEPKEE

SEQ ID NO: 1457 - protein, 102 aa, Homo sapiens
MSARVRSRSRGRGDGQEAPDVVAFVAPGESQQEEPPTDNQDIEPGQEREGTPPIEERKVEGDCQEMDLEKTRSERGDGSDVKEKTPPNPKHAKTKEAGDGQP

SEQ ID NO: 1458 - protein, 500 aa, Homo sapiens [sequence omitted]

SEQ ID NO: 1459 - protein, 380 aa, Homo sapiens
  misc_feature (1)...(380): Xaa = any amino acid or nothing
MTPIRKINPLIKLINHSFIDLPTPSNISAXXNFGSLLGACLILQITTGLFLAMHYSPDASTAFSSIAHITRDVNYGXIIRYLHANGASIFFICLFLHIGRGLYYGSFLYSETXNIGIILLLATIATAFIGYVLPXGQISFXGATVITNLLSAIPYIGTDLVQXIXGGYSVDSPTLTRFFTFHFILPFIIAALAALHLLFLHETGSNNPLGITSHSDKITFHPYYTIKDALGLLLFLLSLMTLTLFSPDLLGDPDNYTLANPLNTPPHIKPEXYFLFAYTILRSVPNKLGGVLALLLSILILAIIPILHISKQQSIIFRPLSQSLYXLLAADLLILTXIGGQPVSYPFTIIGQVASVLYFTTILILIPTISLIENKILKWA

SEQ ID NO: 1460 - protein, 135 aa, Homo sapiens [sequence omitted]

SEQ ID NO: 1461 - protein, 113 aa, Homo sapiens
MTPGVVHASPPQSQRVPRQAPCEWAIRNIGQKPKEPNCHNCGTHIGLRSKTLRGTPNYLPIRQDTHPPSVIFCLAGVGVPGGTCRPAPCVPRFAALPWATNHPGPGCLSDLRA

SEQ ID NO: 1462 - protein, 328 aa, Homo sapiens
MAAGIVASRRLRDLLTRRLTGSNYPGLSISLRLTGSSAQEEASGVALGEAPDHSYESLRVTSAQKHVLHVQLNRPNKRNAMNKVFWREMVECFNKISRDADCRAVVISGAGKMFTAGIDLMDMASDILQPKGDDVARISWYLRDIITRYQETFNVIERCPKPVIAAVHGGCIGGGVDLVTACDIRYCAQDAFFQVKEVDVGLAADVGTLQRLPKVIGNQSLVNELAFTARKMMADEALGSGLVSRVFPDKEVMLDAALALAAEISSKSPVAVQSTKVNLLYSRDHSVAESLNYVASWNMSMLQTQDLVKSVQATTENKELKTVTFSKL

SEQ ID NO: 1463 - protein, 432 aa, Homo sapiens
MTTSIRQFTSSSSIKGSSGLGGGSSRTSCRLSGGLGAGSCRLGSAGGLGSTLGGSSYSSCYSFGSGGGYGSSFGGVDGLLAGGEKATMQNLNDRLASYLDKVRALEEANTELEVKIRDWYQRQAPGPARDYSQYYRTIEELQNKILTATVDNANILLQIDNARLAADDFRTKFETEQALRLSVEADINGLRRVLDELTLARADLEMQIENLKEELAYLKKNHEEEMNALRGQVGGEINVEMDAAPGVDLSRILNEMRDQYEKMAEKNRKDAEDWFFSKTEELNREVATNSELVQSGKSEISELRRTMQALEIELQSQLSMKASLEGNLAETENRYCVQLSQIQGLIGSVEEQLAQLRCEMEQQNQEYKILLDVKTRLEQEIATYRRLLEGEDAHLTQYKKEPVTTRQVRTIVEEVQDGKVISSREQVHQTTR

SEQ ID NO: 1464 - protein, 740 aa, Homo sapiens
MAAFSEMGVMPEIAQAVEEMDWLLPTDIQAESIPLILGGGDVLMAAETGSGKTGAFSIPVIQIVYETLKDQQEGKKGKTTIKTGASVLNKWQMNPYDRGSAFAIGSDGLCCQSREVKEWHGCRATKGLMKGKHYYEVSCHDQGLCRVGWSTMQASLDLGTDKFGFGFGGTGKKSHNKQFDNYGEEFTMHDTIGCYLDIDKGHVKFSKNGKDLGLAFEIPPHMKNQALFPACVLKNAELKFNFGEEEFKFPPKDGFVALSKAPDGYIVKSQHSGNAQVTQTKFLPNAPKALIVEPSRELAEQTLNNIKQFKKYIDNPKLRELLIIGGVAARDQLSVLENGVDIVVGTPGRLDDLVSTGKLNLSQVRFLVLDEADGLLSQGYSDFINRMHNQIPQVTSDGKRLQVIVCSATLHSFDVKKLSEKIMHFPTWVDLKGEDSVPDTVHHVVVPVNPKTDRLWERLGKSHIRTDDVHAKDNTRPGANSPEMWSEAIKILKGEYAVRAIKEHKMDQAIIFCRTKIDCDNLEQYFIQQGGGPDKKGHQFSCVCLHGDRKPHERKQNLERFKKGDVRFLICTDVAARGIDIHGVPYVINVTLPDEKQNYVHRIGRVGRAERMGLAISLVATEKEKVWYHVCSSRGKGCYNTRLKEDGGCTIWYNEMQLLSEIEEHLNCTISQVEPDIKVPVDEFDGKVTYGQKRAAGGGSYKGHVDILAPTVQELAALEKEAQTSFLHLGYLPNQLFRTF

SEQ ID NO: 1465 - protein, 480 aa, Homo sapiens
MQIPRAALLPLLLLLLAAPASAQLSRAGRSAPLAAGCPDRCEPARCPPQPEHCEGGRARDACGCCEVCGAPEGAACGLQEGPCGEGLQCVVPFGVPASATVRRRAQAGLCVCASSEPVCGSDANTYANLCQLRAASRRSERLHRPPVIVLQRGACGQGQEDPNSLRHKYNFIADVVEKIAPAVVHIELFRKLPFSKREVPVASGSGFIVSEDGLIVTNAHVVTNKHRVKVELKNGATYEAKIKDVDEKADIALIKIDHQGKLPVLLLGRSSELRPGEFVVAIGSPFSLQNTVTTGIVSTTQRGGKELGLRNSDMDYIQTDAIINYGNSGGPLVNLDGEVIGINTLKVTAGISFAIPSDKIKKFLTESHDRQAKGKAITKKKYIGIRMMSLTSSKAKELKDRHRDFPDVISGAYIIEVIPDTPAEAGGLKENDVIISINGQSVVSANDVSDVIKRESTLNMVVRRGNEDIMITVIPEEIDP

SEQ ID NO: 1466 - protein, 177 aa, Homo sapiens
MSSNECFKCGRSGHWARECPTGGGRGRGMRSRGRGGFTSDRGFQFVSSSLPDICYRCGESGHLAKDCDLQEDACYNCGRGGHIAKDCKEPKREREQCCYNCGKPGHLARDCDHADEQKCYSCGEFGHIQKDCTKVKCYRCGETGHVAINCSKTSEVNCYRCGESGHLARECTIEATA

SEQ ID NO: 1467 - protein, 211 aa, Homo sapiens
MTPWLGLIVLLGSWSLGDWGAEACTCSPSHPQDAFCNSDIVIRAKVVGKKLVKEGPFGTLVYTIKQMKMYRGFTKMPHVQYIHTEASESLCGLKLEVNKYQYLLTGRVYDGKMYTGLCNFVERWDQLTLSQRKGLNYRYHLGCNCKIKSCYYLPCFVTSKNECLWTDMLSNFGYPGYQSKHYACIRQKGGYCSWYRGWAPPDKSIINATDP

SEQ ID NO: 1468 - protein, 191 aa, Homo sapiens
MAAYSYRPGPGAGPGPAAGAALPDQSFLWNVFQRVDKDRSGVISDTELQQALSNGTWTPFNPVTVRSIISMFDRENKAGVNFSEFTGVWKYITDWQNVFRTYDRDNSGMIDKNELKQALSGFGYRLSDQFHDILIRKFDRQGRGQIAFDDFIQGCIVLQRLTDIFRRYDTDQDGWIQVSYEQYLSMVFSIV

SEQ ID NO: 1469 - protein, 154 aa, Homo sapiens
MAENSGRAGKSSGSGAGKGAVSAEQVIAGFNRLRQEQRGLASKAAELEMELNEHSLVIDTLKEVDETRKCYRMVGGVLVERTVKEVLPALENNKEQIQKIIETLTQQLQAKGKELNEFREKHNIRLMGEDEKPAAKENSEGAGAKASSAGVLVS

SEQ ID NO: 1470 - protein, 251 aa, Homo sapiens
VLNWPLNLPVTLSTSATFIWMDAWSLAPMMRLLAENFRGTYRSTNSPASFCISRLGCACCPARRRPRCNFLRSSRIRVHPTPAASTMPPKFDPNEIKVVYLRCTGGEVGATSALAPKIGPLGLSPKKVGDDIAKATGDWKGLRITVKLTIQNRQAQIEVVPSASALIIKALKEPPRDRKKQKNIKHSGNITFDEIVNIARQMRHRSLARELSGTIKEILGTAQSVGCNVDGRHPHDIIDDINSGAVECPAS

SEQ ID NO: 1471 - protein, 324 aa, Homo sapiens
MPELAVQKVVVHPLVLLSVVDHFNRIGKVGNQKRVVGVLLGSWQKKVLDVSNSFAVPFDEDDKDDSVWFLDHDYLENMYGMFKKVNARERIVGWYHTGPKLHKNDIAINELMKRYCPNSVLVIIDVKPKDLGLPTEAYISVEEVHDDGTPTSKTFEHVTSEIGAEEAEEVGVEHLLRDIKDTTVGTLSQRITNQVHGLKGLNSKLLDIRSYLEKVATGKLPINHQIIYQLQDVFNLLPDVSLQEFVKAFYLKTNDQMVVVYLASLIRSVVALHNLINNKIANRDAEKKEGQEKEESKKDRKEDKEKDKDKEKSDVKKEEKKEKK

SEQ ID NO: 1472 - protein, 279 aa, Homo sapiens
MTKNEKKSLNQSLAEWKLFIYNPTTGEFLGRTAKSWGLILLFYLVFYGFLAALFSFTMWVMLQTLNDEVPKYRDQIPSPGLMVFPKPVTALEYTFSRSDPTSYAGYIEDLKKFLKPYTLEEQKNLTVCPDGALFEQKGPVYVACQFPISLLQACSGMNDPDFGYSQGNPCILVKMNRIIGLKPEGVPRIDCVSKNEDIPNVAVYPHNGMIDLKYFPYYGKKLHVGYLQPLVAVQVSFAPNNTGKEVTVECKIDGSANLKSQDDRDKFLGRVMFKITARA

SEQ ID NO: 1473 - protein, 1058 aa, Homo sapiens
MSSSPLSKKRRVSGPDPKPGSNCSPAQSVLSEVPSVPTNGMAKNGSEADIDEGLYSRQLYVLGHEAMKRLQTSSVLVSGLRGLGVEIAKNIILGGVKAVTLHDQGTAQWADLSSQFYLREEDIGKNRAEVSQPRLAELNSYVPVTAYTGPLVEDFLSGFQVVVLTNTPLEDQLRVGEFCHNRGIKLVVADTRGLFGQLFCDFGEEMILTDSNGEQPLSAMVSMVTKDNPGVVTCLDEARHGFESGDFVSFSEVQGMVELNGNQPMEIKVLGPYTFSICDTSNFSDYIRGGIVSQVKVPKKISFKSLVASLAEPDFVVTDFAKFSRPAQLHIGFQALHQFCAQHGRPPRPRNEEDAAELVALAQAVNARALPAVQQNNLDEDLIRKLAYVAAGDLAPINAFIGGLAAQEVMKACSGKFMPIMQWLYFDALECLPEDKEVLTEDKCLQRQNRYDGQVAVFGSDLQEKLGKQKYFLVGAGAIGCELLKNFAMIGLGCGEGGEIIVTDMDTIEKSNLNRQFLFRPWDVTKLKSDTAAAAVRQMNPHIRVTSHQNRVGPDTERIYDDDFFQNLDGVANALDNVDARMYMDRRCVYYRKPLLESGTLGTKGNVQVVIPFLTESYSSSQDPPEKSIPICTLKNFPNAIEHTLQWARDEFEGLFKQPAENVNQYLTDPKFVERTLRLAGTQPLEVLEAVQRSLVLQRPQTWADCVTWACHHWHTQYSNNIRQLLHNFPPDQLTSSGAPFWSGPKRCPHPLTFDVNNPLHLDYVMAAANLFAQTYGLTGSQDRAAVATFLQSVQVPEFTPKSGVKIHVSDQELQSANASVDDSRLEELKATLPSPDKLPGFKMYPIDFEKDDDSNFHMDFIVAASNLRAENYDIPSADRHKSKLIAGKIIPAIATTTAAVVGLVCLELYKVVQGHRQLDSYKNGFLNLALPFFGFSEPLAAPRHQYYNQEWTLWDRFEVQGLQPNGEEMTLKQFLDYFKTEHKLEITMLSQGVSMLYSFFMPAAKLKERLDQPMTEIVSRVSKRKLGRHVRALVLELCCNDESGEDVEVPYVRYTIR

SEQ ID NO: 1474 - protein, 91 aa, Homo sapiens
MVYISNGQVLDSRSQSPWRLSLITDFFWGIAEFVVLFFKTLLQQDVKKRRSYGNSSDSRYDDGRGPPGNPPRRMGRINHLRGPSPPPMAGG

SEQ ID NO: 1475 - protein, 190 aa, Homo sapiens
MAEKTQKSVKIAPGAVVCVESEIRGDVTIGPRTVIHPKARIIAEAGPIVIGEGNLIEEQALIINAYPDNITPDTEDPEPKPMIIGTNNVFEVGCYSQAMKMGDNNVIESKAYVGRNVILTSGCIIGACCNLNTFEVIPENTVIYGADCLRRVQTERPQPQTLQLDFLMKILPNYHHLKKTMKGSSTPVKN

SEQ ID NO: 1476 - protein, 444 aa, Homo sapiens
MREIVHIQAGQCGNQIGAKFWEVISDEHGIDPTGTYHGDSDLQLDRISVYYNEATGGKYVPRAILVDLEPGTMDSVRSGPFGQIFRPDNFVFGQSGAGNNWAKGHYTEGAELVDSVLDVVRKEAESCDCLQGFQLTHSLGGGTGSGMGTLLISKIREEYPDRIMNTFSVVPSPKVSDTVVEPYNATLSVHQLVENTDETYCIDNEALYDICFRTLKLTTPTYGDLNHLVSATMSGVTTCLRFPGQLNADLRKLAVNMVPFPRLHFFMPGFAPLTSRGSQQYRALTVPELTQQVFDAKNMMAACDPRHGRYLTVAAVFRGRMSMKEVDEQMLNVQNKNSSYFVEWIPNNVKTAVCDIPPRGLKMAVTFIGNSTAIQELFKRISEQFTAMFRRKAFLHWYTGEGMDEMEFTEAESNMNDLVSEYQQYQDATAEEEEDFGEEAEEEA

SEQ ID NO: 1477 - protein, 667 aa, Homo sapiens
MNPTETKAVKTEPEKKSQSTKPKSLPKQASDTGSNDAHNKKAVSRSAEQQPSEKSTEPKTKPQDMISAGGESVAGITAISGKPGDKKKEKKSLTPAVPVESKPDKPSGKSGMDAALDDLIDTLGGPEETEEENTTYTGPEVSDPMSSTYIEELGKREVTIPPKYRELLAKKEGITGPPADSSKPIGPDDAIDALSSDFTCGSPTAAGKKTEKEESTEVLKAQSAGTVRSAAPPQEKKRKVEKDTMSDQALEALSASLGTRQAEPELDLRSIKEVDEAKAKEEKLEKCGEDDETIPSEYRLKPATDKDGKPLLPEPEEKPKPRSESELIDELSEDFDRSECKEKPSKPTEKTEESKAAAPAPVSEAVCRTSMCSIQSAPPEPATLKGTVPDDAVEALADSLGKKEADPEDGKPVMDKVKEKAKEEDREKLGEKEETIPPDYRLEEVKDKDGKPLLPKESKEQLPPMSEDFLLDALSEDFSGPQNASSLKFEDAKLAAAISEVVSQTPASTTQAGAPPRDTSQSDKDLDDALDKLSDSLGQRQPDPDENKPMEDKVKEKAKAEHRDKLGERDDTIPPEYRHLLDDNGQDKPVKPPTKKSEDSKKPADDQDPIDALSGDLDSCPSTTETSQNTAKDKCKKAASSSKAPKNGGKAKDSAKTTEETSKPKDD

SEQ ID NO: 1478 - protein, 113 aa, Homo sapiens
MSASVVSVISRFLEEYLSSTPQRLKLLDAYLLYILLTGALQFGYCLLVGTFPFNSFLSGFISCVGSFILAVCLRIQINPQNKADFQGISPERAFADFLFASTILHLVVMNFVG

SEQ ID NO: 1479 - protein, 748 aa, Homo sapiens
MGRAGAAAVIPGLALLWAVGLGSAAPSPPRLRLSFQELQAWHGLQTFSLERTCCYQALLVDEERGRLFVGAENHVASLNLDNISKRAKKLAWPAPVEWREECNWAGKDIGTECMNFVKLLHAYNRTHLLACGTGAFHPTCAFVEVGHRAEEPVLRLDPGRIEDGKGKSPYDPRHRAASVLVGEELYSGVAADLMGRDFTIFRSLGQRPSLRTEPHDSRWLNEPKFVKVFWIPESENPDDDKIYFFFRETAVEAAPALGRLSVSRVGQICRNDVGGQRSLVNKWTTFLKARLVCSVPGVEGDTHFDQLQDVFLLSSRDHRTPLLYAVFSTSSIFQGSAVCVYSMNDVRRAFLGPFAHKEGPMHQWVSYQGRVPYPRPGMCPSKTFGTFSSTKDFPDDVIQFARNHPLMYNSVLPTGGRPLFLQVGANYTFTQIAADRVAAADGHYDVLFIGTDVGTVLKVISVPKGSRPSAEGLLLEELHVFEDSAAVTSMQISSKRHQLYVASRSAVAQIALHRCAAHGRVCTECCLARDPYCAWDGVACTRFQPSAKRRFRRQDVRNGDPSTLCSGDSSRPALLEHKVFGVEGSSAFLECEPRSLQARVEWTFQRAGVTAHTQVLAEERTERTARGLLLRRLRRRDSGVYLCAAVEQGFTQPLRRLSLHVLSATQAERLARAEEAAPAAPPGPKLWYRDFLQLVEPGGGGSANSLRMCRPQPALQSLPLESRRKGRNRRTHAPEPRAERGPRSATHW

SEQ ID NO: 1480 - protein, 651 aa, Homo sapiens
MARGSAVAWAALGPLLWGCALGLQGGMLYPQESPSRECKELDGLWSFRADFSDNRRRGFEEQWYRRPLWESGPTVDMPVPSSFNDISQDWRLRHFVGWVWYEREVILPERWTQDLRTRVVLRIGSAHSYAIVWVNGVDTLEHEGGYLPFEADISNLVQVGPLPSRLRITIAINNTLTPTTLPPGTIQYLTDTSKYPKGYFVQNTYFDFFNYAGLQRSVLLYTTPTTYIDDITVTTSVEQDSGLVNYQISVKGSNLFKLEVRLLDAENKVVANGTGTQGQLKVPGVSLWWPYLMHERPAYLYSLEVQLTAQTSLGPVSDFYTLPVGIRTVAVTKSQFLINGKPFYFHGVNKHEDADIRGKGFDWPLLVKDFNLLRWLGANAFRTSHYPYAEEVMQMCDRYGIVVIDECPGVGLALPQFFNNVSLHHHMQVMEEVVRRDKNHPAVVMWSVANEPASHLESAGYYLKMVIAHTKSLDPSRPVTFVSNSNYAADKGAPYVDVICLNSYYSWYHDYGHLELIQLQLATQFENWYKKYQKPIIQSEYGAETIAGFHQDPPLMFTEEYQKSLLEQYHLGLDQKRRKYVVGELIWNFADFMTEQSPTRVLGNKKGIFTRQRQPKSAAFLLRERYWKIANETRYPHSVAKSQCLENSLFT

SEQ ID NO: 1481 - protein, 618 aa, Homo sapiens
SGSKAAGVRGVPRARPAPPHVTRSDMVSPPPGAAAVAARAGLRVGPAPRPLMGSQGRSGPPGNGGPGEGEGGEARKLQEGRVARGKRRKGKGKGKARAGQGGRGSGAEGKPGPQTAKEAAGPGADAGARACPREEAEGGRSVEEGARGIVKGVEGSAGAGKEAQGREYGKKEEWRVRARRREGARPGRAQGRGGQAWADIAGTGVAMAAAAGEEEEEEEAARESAARPAAGPALWRLPEELLLLICSYLDMRALGRLAQVCRWLRRFTSCDLLWRRIARASLNSGFTRLGTDLMTSVPVKERVKVSQNWRLGRCREGILLKWRCSQMPWMQLEDDSLYISQANFILAYQFRPDGASLNRRPLGVFAGHDEDVCHFVLANSHIVSAGGDGKIGIHKIHSTFTVKYSAHEQEVNCVDCKGGIIVSGSRDRTAKVWPLASGRLGQCLHTIQTEDRVWSIAISPLLSSFVTGTACCGHFSPLRIWDLNSGQLMTHLGSDFPPGAGVLDVMYESPFTLLSCGYDTYVRYWDLRTSVRKCVMEWEEPHDSTLYCLQTDGNHLLATGSSYYGVVRLWDRRQRACLHAFPLTSTPLSSPVYCLRLTTKHLYAALSYNLHVLDFQNP

SEQ ID NO: 1482 - protein, 219 aa, Homo sapiens
MASGSNWLSGVNVVLVMAYGSLDLKEEIDIRLSRVQDIKYEPQLLADDDARLLQLETQGNQSCYNYLYRMKALDAIRTSEIPFHSEGRHPRSLMGKNFRSYLLDLRNTSTPFKGVRKALIDTLLDGYETARYGTGVFGQNEYLRYQEALSELATAVKARIGSSQRHHQSAAKDLTQSPEVSPTTIQVTYLPSSQKSKRAKHFLELKSFKDNYNTLESTL

SEQ ID NO: 1483 - protein, 216 aa, Homo sapiens
MAAQGEPQVQFKLVLVGDGGTGKTTFVKRHLTGEFEKKYVATLGVEVHPLVFHTNRGPIKFNVWDTAGQEKFGGLRDGYYIQAQCAIIMFDVTSRVTYKNVPNWHRDLVRVCENIPIVLCGNKVDIKDRKVKAKSIVFHRKKNLQYYDISAKSNYNFEKPFLWLARKLIGDPNLEFVAMPALAPPEVVMDPALAAQYEHDLEVAQTTALPDEDDDL

SEQ ID NO: 1484 - protein, 257 aa, Homo sapiens
MVLQVSAAPRTVALTALLMVLLTSVVQGRATPENYVHQLRQECYAFNGTQRFLERYIYNREEFVRFDSDVGEFRAVTELGRPDEDYWNSQKDILEEERAVPDRMCRHNYELDEAVTLQRRVQPRVNVSPSKKGPLQHHNLLVCHVTDFYPGSIQVRWFLNGQEETAGVVSTNLIRNGDWTFQILVMLEMTPQQGDVYTCQVEHTSLDSPVTVEWKAQSDSARSKTLTGAGGFVLGLIICGVGIFMHRRSKKVQRGSA

SEQ ID NO: 1485 - protein, 183 aa, Homo sapiens
MRAAYLFLLFLPAGLLAQGQYDLDPLPPFPDHVQYTHYSDQIDNPDYYDYQEVTPRPSEEQFQFQSQQQVQQEVIPAPTPEPGNAELEPTEPGPLDCREEQYPCTRLYSIHRPCKQCLNEVCFYSLRRVYVINKEICVRTVCAHEELLRADLCRDKFSKCGVMASSGLCQSVAASCARSCGSC

SEQ ID NO: 1486 - protein, 139 aa, Homo sapiens
MSSLPVPYKLPVSLSVGSCVIIKGTPIHSFINDPQLQVDFYTDMDEDSDIAFRFRVHFGNHVVMNRREFGIWMLEETTDYVPFEDGKQFELCIYVHYNEYEIKVNGIRIYGFVHRIPPSFVKMVQVSRDISLTSVCVCN

SEQ ID NO: 1487 - protein, 391 aa, Homo sapiens
MADIDNKEQSELDQDLDDVEEVEEEETGEETKLKARQLTVQMMQNPQILAALQERLDGLVETPTGYIESLPRVVKRRVNALKNLQVKCAQIEAKFYEEVHDLERKYAVLYQPLFDKRFEIINAIYEPTEEECEWKPDEEDEISEELKEKAKIEDEKKDEEKEDPKGIPEFWLTVFKNVDLLSDMVQEHDEPILKHLKDIKVKFSDAGQPMSFVLEFHFEPNEYFTNEVLTKTYRMRSEPDDSDPFSFDGPEIMGCTGCQIDWKKGKNVTLKTIKKKQKHKGRGTVRTVTKTVSNDSFFNFFAPPEVPESGDLDDDAEAILAADFEIGHFLRERIIPRSVLYFTGEAIEDDDDDYDEEGEEADEEGEEEGDEENDPDYDPKKDQNPAECKQQ

SEQ ID NO: 1488 - protein, 398 aa, Homo sapiens
MNWHLPLFLLASVTLPSICSHFNPLSLEELGSNTGIQVFNQIVKSRPHDNIVISPHGIASVLGMLQLGADGRTKKQLAMVMRYGVNGVGKILKKINKAIVSKKNKDIVTVANAVFVKNASEIEVPFVTRNKDVFQCEVRNVNFEDPASACDSINAWVKNETRDMIDNLLSPDLIDGVLTRLVLVNAVYFKGLWKSRFQPENTKKRTFVAADGKSYQVPMLAQLSVFRCGSTSAPNDLWYNFIELPYHGESISMLIALPTESSTPLSAIIPHISTKTIDSWMSIMVPKRVQVILPKFTAVAQTDLKEPLKVLGITDMFDSSKANFAKITTGSENLHVSHILQKAKIEVSEDGTKASAATTAILIARSSPPWFIVDRPFLFFIRHNPTGAVLFMGQINKP

SEQ ID NO: 1489 - protein, 585 aa, Homo sapiens
MTPPRLFWVWLLVAGTQGVNDGDMRLADGGATNQGRVEIFYRGQWGTVCDNLWDLTDASVVCRALGFENATQALGRAAFGQGSGPIMLDEVQCTGTEASLADCKSLGWLKSNCRHERDAGVVCTNETRSTHTLDLSRELSEALGQIFDSQRGCDLSISVNVQGEDALGFCGHTVILTANLEAQALWKEPGSNVTMSVDAECVPMVRDLLRYFYSRRIDITLSSVKCFHKLASAYGARQLQGYCASLFAILLPQDPSFQMPLDLYAYAVATGDALLEKLCLQFLAWNFEALTQAEAWPSVPTDLLQLLLPRSDLAVPSELALLKAVDTWSWGERASHEEVEGLVEKIRFPMMLPEELFELQFNLSLYWSHEALFQKKTLQALEFHTVPFQLLARYKGLNLTEDTYKPRIYTSPTWSAFVTDSSWSARKSQLVYQSRRGPLVKYSSDYFQAPSDYRYYPYQSFQTPQHPSFLFQDKRVSWSLVYLPTIQSCWNYGFSCSSDELPVLGLTKSGGSDRTIAYENKALMLCEGLFVADVTDFEGWKAAIPSALDTNSSKSTSSFPCPAGHFNGFRTVIRPFYLTNSSGVD

SEQ ID NO: 1490 - protein, 403 aa, Homo sapiens
MSHRKFSAPRHGSLGFLPRKRSSRHRGKVKSFPKDDPSKPVHLTAFLGYKAGMTHIVREVDRPGSKVNKKEVVEAVTIVETPPMVVVGIVGYVETPRGLRTFKTVFAEHISDECKRRFYKNWHKSKKKAFTKYCKKWQDEDGKKQLEKDFSSMKKYCQVIRVIAHTQMRLLPLRQKKAHLMEIQVNGGTVAEKLDWARERLEQQVPVNQVFGQDEMIDVIGVTKGKGYKGVTSRWHTKKLPRKTHRGLRKVACIGAWHPARVAFSVARAGQKGYHHRTEINKKIYKIGQGYLIKDGKLIKNNASTDYDLSDKSINPLGGFVHYGEVTNDFVMLKGCVVGTKKRVLTLRKSLLVQTKRRALEKIDLKFIDTTSKFGHGRFQTMEEKKAFMGPLKKDRIAKEEGA

SEQ ID NO: 1491 - protein, 451 aa, Homo sapiens [sequence omitted]

SEQ ID NO: 1492 - protein, 77 aa, Homo sapiens
FFLRWSQSLTLLPKVECSGLISAHCNLPLPSSSDSLASASRIAGITGIRCHAWLIFVFLVETGFHHLDQTGLELLTS

SEQ ID NO: 1493 - protein, 272 aa, Homo sapiens
SVVEPRACEERAARQLPASRPASPRSRVLRSAAMASEELACKLERRLRREEAEESGPQLAPLGAPAPEPKPEPEPPARAPTASADAELSAQLSRRLDINEGAARPRRCRVFNPYTEFPEFSRRLIKDLESMFKLYDAGRDGFIDLMELKLMMEKLGAPQTHLGLKSMIKEVDEDFDGKLSFREFLLIFHKAAAGELQEDSGLMALAKLSEIDVALEGVRGAKNFFEAKVQALSSASKFEAELKAEQDERKREEEERRLRQAAFQKLKANFNT

SEQ ID NO: 1494 - protein, 589 aa, Homo sapiens
MAAADGDDSLYPIAVLIDELRNEDVQLRLNSIKKLSTIALALGVERTRSELLPFLTDTIYDEDEVLLALAEQLGTFTTLVGGPEYVHCLLPPLESLATVEETVVRDKAVESLRAISHEHSPSDLEAHFVPLVKRLAGGDWFTSRTSACGLFSVCYPRVSSAVKAELRQYFRNLCSDDTPMVRRAAASKLGEFAKVLELDNVKSEIIPMFSNLASDEQDSVRLLAVEACVNIAQLLPQEDLEALVMPTLRQAAEDKSWRVRYMVADKFTELQKAVGPEITKTDLVPAFQNLMKDCEAEVRAAASHKVKEFCENLSADCRENVIMSQILPCIKELVSDANQHVKSALASVIMGLSPILGKDNTIEHLLPLFLAQLKDECPEVRLNIISNLDCVNEVIGIRQLSQSLLPAIVELAEDAKWRVRLAIIEYMPLLAGQLGVEFFDEKLNSLCMAWLVDHVYAIREAATSNLKKLVEKFGKEWAHATIIPKVLAMSGDPNYLHRMTTLFCINVLSEVCGQDITTKHMLPTVLRMAGDPVANVRFNVAKSLQKIGPILDNSTLQSEVKPILEKLTQDQDVDVKYFAQEALTVLSLA

SEQ ID NO: 1495 - protein, 178 aa, Homo sapiens [sequence omitted]

SEQ ID NO: 1496 - protein, 167 aa, Homo sapiens
MLVLLAFIIAFHITSAALLFIATVDNAWWVGDEFFADVWRICTNNTNCTVINDSFQEYSTLQAVQATMILSTILCCIAFFIFVLQLFRLKQGERFVLTSIIQLMSCLCVMIAASIYTDRREDIHDKNAKFYPVTREGSYGYSYILAWVAFACTFISGMMYLILRKRK

SEQ ID NO: 1497 - protein, 1616 aa, Homo sapiens
MPARTAPARVPTLAVPAISLPDDVRRRLKDLERDSLTEKECVKEKLNLLHEFLQTEIKNQLCDLETKLRKEELSEEGYLAKVKSLLNKDLSLENGAHAYNREVNGRLENGNQARSEARRVGMADANSPPKPLSKPRTPRRSKSDGEAKPEPSPSPRITRKSTRQTTITSHFAKGPAKRKPQEESERAKSDESIKEEDKDQDEKRRRVTSRERVARPLPAEEPERAKSGTRTEKEEERDEKEEKRLRSQTKEPTPKQKLKEEPDREARAGVQADEDEDGDEKDEKKHRSQPKDLAAKRRPEEKEPEKVNPQISDEKDEDEKEEKRRKTTPKEPTEKKMARAKTVMNSKTHPPKCIQCGQYLDDPDLKYGQHPPDAVDEPQMLTNEKLSIFDANESGFESYEALPQHKLTCFSVYCKHGHLCPIDTGLIEKNIELFFSGSAKPIYDDDPSLEGGVNGKNLGPINEWWITGFDGGEKALIGFSTSFAEYILMDPSPEYAPIFGLMQEKIYISKIVVEFLQSNSDSTYEDLINKIETTVPPSGLNLNRFTEDSLLRHAQFVVEQVESYDEAGDSDEQPIFLTPCMRDLIKLAGVTLGQRRAQARRQTIRHSTREKDRGPTKATTTKLVYQIFDTFFAEQIEKDDREDKENAFKRRRCGVCEVCQQPECGKCKACKDMVKFGGSGRSKQACQERRCPNMAMKEADDDEEVDDNIPEMPSPKKMHQGKKKKQNKNRISWVGEAVKTDGKKSYYKKVCIDAETLEVGDCVSVIPDDSSKPLYLARVTALWEDSSNGQMFHAHWFCAGTDTVLGATSDPLELFLVDECEDMQLSYIHSKVKVIYKAPSENWAMEGGMDPESLLEGDDGKTYFYQLWYDQDYARFESPPKTQPTEDNKFKFCVSCARLAEMRQKEIPRVLEQLEDLDSRVLYYSATKNGILYRVGDGVYLPPEAFTFNIKLSSPVKRPRKEPVDEDLYPEHYRKYSDYIKGSNLDAPEPYRIGRIKEIFCPKKSNGRPNETDIKIRVNKFYRPENTHKSTPASYHADINLLYWSDEEAVVDFKAVQGRCTVEYGEDLPECVQVYSMGGPNRFYFLEAYNAKSKSFEDPPNHARSPGNKGKGKGKGKGKPKSQACEPSEPEIEIKLPKLRTLDVFSGCGGLSEGFHQAGISDTLWAIEMWDPAAQAFRLNNPGSTVFTEDCNILLKLVMAGETTNSRGQRLPQKGDVEMLCGGPPCQGFSGMNRFNSRTYSKFKNSLVVSFLSYCDYYRPRFFLLENVRNFVSFKRSMVLKLTLRCLVRMGYQCTFGVLQAGQYGVAQTRRRAIILAAAPGEKLPLFPEPLHVFAPRACQLSVVVDDKKFVSNITRLSSGPFRTITVRDTMSDLPEVRNGASALEISYNGEPQSWFQRQLRGAQYQPILRDHICKDMSALVAARMRHIPLAPGSDWRDLPNIEVRLSDGTMARKLRYTHHDRKNGRSSSGALRGVCSCVEAGKACDPAARQFNTLIPWCLPHTGNRHNHWAGLYGRLEWDGFFSTTVTNPEPMGKQGRVLHPEQHRVVSVRECARSQGFPDTYRLFGNILDKHRQVGNAVPPPLAKAIGLEIKLCMLAKARESASAKIKEEEAAKD

SEQ ID NO: 1498 - protein, 185 aa, Homo sapiens
MKLVSVALMYLGSLAFLGADTARLDVASEFRKKWNKWALSRGKRELRMSSSYPTGLADVKAGPAQTLIRPQDMKGASRSPEDSSPDAARIRVKRYRQSMNNFQGLRSFGCRFGTCTVQKLAHQIYQFTDKDKDNVAPRSKISPQGYGRRRRRSLPEAGPGRTLVSSKPQAHGAPAPPSGSAPHFL

SEQ ID NO: 1499 - protein, 97 aa, Homo sapiens
MPSQMEHAMETMMFTFHKFAGDKGYLTKEDLRVLMEKEFPGFLENQKDPLAVDKIMKDLDQCRDGKVGFQSFFSLIAGLTIACNDYFVVHMKQKGKK

SEQ ID NO: 1500 - protein, 220 aa, Homo sapiens
MSMGLEITGTALAVLGWLGTIVCCALPMWRVSAFIGSNIITSQNIWEGLWMNCVVQSTGQMQCKVYDSLLALPQDLQAARALIVVAILLAAFGLLVALVGAQCTNCVQDDTAKAKITIVAGVLFLLAALLTLVPVSWSANTIIRDFYNPVVPEAQKREMGAGLYVGWAAAALQLLGGALLCCSCPPREKKYTATKVVYSAPRSTGPGASLGTGYDRKDYV

SEQ ID NO: 1501 - protein, 276 aa, Homo sapiens
MAAGFKTVEPLEYYRRFLKENCRPDGRELGEFRTTTVNIGSISTADGSALVKLGNTTVICGVKAEFAAPSTDAPDKGYVVPNVDLPPLCSSRFRSGPPGEEAQVASQFIADVIENSQIIQKEDLCISPGKLVWVLYCDLICLDYDGNILDACTFALLAALKNVQLPEVTINEETALAEVNLKKKSYLNIRTHPVATSFAVFDDTLLIVDPTGEEEHLATGTLTIVMDEEGKLCCLHKPGGSGLTGAKLQDCMSRAVTRHKEVKKLMDEVIKSMKPK

SEQ ID NO: 1502 - protein, 370 aa, Homo sapiens [sequence omitted]

SEQ ID NO: 1503 - protein, 82 aa, Homo sapiens
SCVSKRAGTMSAETASGPTEDQVEILEYNFNKVDKHPDSTTLCLIAAEAGLSEEETQKWFKQRLAKWRRSEGLPSECRSVTD

SEQ ID NO: 1504 - protein, 419 aa, Homo sapiens
MAVSNIRYGAAVTKEVGMDLKNMGAKNVCLMTDKNLSKLPPVQVAMDSLVKNGIPFTVYDNVRVEPTDSSFMEAIEFAQKGAFDAYVAVGGGSTMDTCKAANLYASSPHSDFLDYVSAPIGKGKPVSVPLKPLIAVPTTSGTGSETTGVAIFDYEHLKVKIGITSRAIKPTLGLIDPLHTLHMPARVVANSGFDVLCHALESYTTLPYHLRSPCPSNPITRPAYQGSNPISDIWAIHALRIVAKYLKRAVRNPDDLEARSHMHLASAFAGIGFGNAGVHLCHGMSYPISGLVKMYKAKDYNVDHPLVPHGLSVVLTSPAVFTFTAQMFPERHLEMAEILGADTRTARIQDAGLVLADTLRKFLFDLDVDDGLAAVGYSKADIPALVKGTLPQERVTKLAPRPQSEEDLAALFEASMKLY

SEQ ID NO: 1505 - protein, 92 aa, Homo sapiens [sequence omitted]

SEQ ID NO: 1506 - protein, 724 aa, Homo sapiens
MPEEVHHGEEEVETFAFQAEIAQLMSLIINTFYSNKEIFLRELISNASDALDKIRYESLTDPSKLDSGKELKIDIIPNPQERTLTLVDTGIGMTKADLINNLGTIAKSGTKAFMEALQAGADISMIGQFGVGFYSAYLVAEKVVVITKHNDDEQYAWESSAGGSFTVRADHGEPIGRGTKVILHLKEDQTEYLEERRVKEVVKKHSQFIGYPITLYLEKEREKEISDDEAEEEKGEKEEEDKDDEEKPKIEDVGSDEEDDSGKDKKKKTKKIKEKYIDQEELNKTKPIWTRNPDDITQEEYGEFYKSLTNDWEDHLAVKHFSVEGQLEFRALLFIPRRAPFDLFENKKKKNNIKLYVRRVFIMDSCDELIPEYLNFIRGVVDSEDLPLNISREMLQQSKILKVIRKNIVKKCLELFSELAEDKENYKKFYEAFSKNLKLGIHEDSTNRRRLSELLRYHTSQSGDEMTSLSEYVSRMKETQKSIYYITGESKEQVANSAFVERVRKRGFEVVYMTEPIDEYCVQQLKEFDGKSLVSVTKEGLELPEDEEEKKKMEESKAKFENLCKLMKEILDKKVEKVTISNRLVSSPCCIVTSTYGWTANMERIMKAQALRDNSTMGYMMAKKHLEINPDHPIVETLRQKAEADKNDKAVKDLVVLLFETALLSSGFSLEDPQTHSNRIYRMIKLGLGIDEDEVAAEEPNAAVPDEIPPLEGDEDASRMEEVD

SEQ ID NO: 1507 - protein, 339 aa, Homo sapiens
MSTVHEILCKLSLEGDHSTPPSAYGSVKAYTNFDAERDALNIETAIKTKGVDEVTIVNILTNRSNAQRQDIAFAYQRRTKKELASALKSALSGHLETVILGLLKTPAQYDASELKASMKGLGTDEDSLIEIICSRTNQELQEINRVYKEMYKTDLEKDIISDTSGDFRKLMVALAKGRRAEDGSVIDYELIDQDARDLYDAGVKRKGTDVPKWISIMTERSVPHLQKVFDRYKSYSPYDMLESIRKEVKGDLENAFLNLVQCIQNKPLYFADRLYDSMKGKGTRDKVLIRIMVSRSEVDMLKIRSEFKRKYGKSLYYYIQQDTKGDYQKALLYLCGGDD

SEQ ID NO: 1508 - protein, 125 aa, Homo sapiens [sequence omitted]

SEQ ID NO: 1509 - protein, 556 aa, Homo sapiens
MELCGLGLPRPPMLLALLLATLLAAMLALLTQVALVVQVAEAARAPSVSAKPGPALWPLPLSVKMTPNLLHLAPENFYISHSPNSTAGPSCTLLEEAFRRYHGYIFGFYKWHHEPAEFQAKTQVQQLLVSITLQSECDAFPNISSDESYTLLVKEPVAVLKANRVWGALRGLETFSQLVYQDSYGTFTINESTIIDSPRFSHRGILIDTSRHYLPVKIILKTLDAMAFNKFNVLHWHIVDDQSFPYQSITFPELSNKGSYSLSHVYTPNDVRMVIEYARLRGIRVLPEFDTPGHTLSWGKGQKDLLTPCYSRQNKLDSFGPINPTLNTTYSFLTTFFKEISEVFPDQFIHLGGDEVEFKCWESNPKIQDFMRQKGFGTDFKKLESFYIQKVLDIIATINKGSIVWQEVFDDKAKLAPGTIVEVWKDSAYPEELSRVTASGFPVILSAPWYLDLISYGQDWRKYYKVEPLDFGGTQKQKQLFIGGEACLWGEYVDATNLTPRLWPRASAVGERLWSSKDVRDMDDAYDRLTRHRCRMVERGIAAQPLYAGYCNHENM

SEQ ID NO: 1510 - protein, 264 aa, Homo sapiens [sequence omitted]

SEQ ID NO: 1511 - protein, 514 aa, Homo sapiens
MADYLISGGTSYVPDDGLTAQQLFNCGDGLTYNDFLILPGYIDFTADQVDLTSALTKKITLKTPLVSSPMDTVTEAGMAIAMALTGGIGFIHHNCTPEFQANEVRKVKKYEQGFITDPVVLSPKDRVRDVFEAKARHGFCGIPITDTGRMGSRLVGIISSRDIDFLKEEEHDCFLEEIMTKREDLVVAPAGITLKEANEILQRSKKGKLPIVNEDDELVAIIARTDLKKNRDYPLASKDAKKQLLCGAAIGTHEDDKYRLDLLAQAGVDVVVLDSSQGNSIFQINMIKYIKDKYPNLQVIGGNVVTAAQAKNLIDAGVDALRVGMGSGSICITQEVLACGRPQATAVYKVSEYARRFGVPVIADGGIQNVGHIAKALALGASTVMMGSLLAATTEAPGEYFFSDGIRLKKYRGMGSLDAMDKHLSSQNRYFSEADKIKVAQGVSGAVQDKGSIHKFVPYLIAGIQHSCQDIGAKSLTQVRAMMYSGELKFEKRTSSAQVEGGVHSLHSYEKRLF

SEQ ID NO: 1512 - protein, 238 aa, Homo sapiens
LCFRFWFCSSVWVSSRLLKMNRLFGKAKPKAPPPSLTDCIGTVDSRAESIDKKISRLDAELVKYKDQIKKMREGPAKNMVKQKALRVLKQKRMYEQQRDNLAQQSFNMEQANYTIQSLKDTKTTVDAMKLGVKEMKKAYKQVKIDQIEDLQDQLEDMMEDANEIQEALSRSYGTPELDEDDLEAELDALGDELLADEDSSYLDEAASAPAIPEGVPTDTKNKDGVLVDEFGLPQIPAS

SEQ ID NO: 1513 - protein, 559 aa, Homo sapiens
MSDAQDGPRVRYNPYTTRPNRRGDTWHDRDRIHVTVRRDRAPPERGGAGTSQDGTSKNCFKITIPYGRKYDKAWLLSMIQSKCSVPFTPIEFHYENTRAQFFVEDASTASALKAVNYKILDRENRRISIIINSSAPPHTILNELKPEQVEQLKLIMSKRYDGSQQALDLKGLRSDPDLVAQNIDVVLNRRSCMAATLRIIEENIPELLSLNLSNNRLYRLDDMSSIVQKAPNLKILNLSGNELKSERELDKIKGLKLEELWLDGNSLCDTFRDQSTYISAIRERFPKLLRLDGHELPPPIAFDVEAPTTLPPCKGSYFGTENLKSLVLHFLQQYYAIYDSGDRQGLLDAYHDGACCSLSIPFIPQNPARSSLAEYFKDSRNVKKLKDPTLRFRLLKHTRLNVVAFLNELPKTQHDVNSFVVDISAQTSTLLCFSVNGVFKEVDGKSRDSLRAFTRTFIAVPASNSGLCIVNDELFVRNASSEEIQRAFAMPAPTPSSSPVPTLSPEQQEMLQAFSTQSGMNLEWSQKCLQDNNWDYTRSAQAFTHLKAKGEIPEVAFMK

SEQ ID NO: 1514 - protein, 915 aa, Homo sapiens [sequence omitted]

SEQ ID NO: 1515 - protein, 234 aa, Homo sapiens
MRKTRLWGLLWMLFVSELRAATKLTEEKYELKEGQTLDVKCDYTLEKFASSQKAWQIIRDGEMPKTLACTERPSKNSHPVQVGRIILEDYHDHGLLRVRMVNLQVEDSGLYQCVIYQPPKEPHMLFDRIRLVVTKGFSGTPGSNENSTQNVYKIPPTTTKALCPLYTSPRTVTQAPPKSTADVSTPDSEINLTNVTDIIRVPVFNIVILLAGGFLSKSLVFSVLFAVTLRSFVP

SEQ ID NO: 1516 - protein, 116 aa, Homo sapiens
MAGIELERCQQQANEVTEIMRNNFGKVLERGVKLAELQQRSDQLLDMSSTFNKTTQNLAQKKCWENIRYRICVGLVVVGVLLIILIVLLVVFLPQSSDSSSAPRTQDAGIASGPGN

SEQ ID NO: 1517 - protein, 155 aa, Homo sapiens
MASLKCSTVVCVICLEKPKYRCPACRVPYCSVVCFRKHKEQCNPETRPVEKKIRSALPTKTVKPVENKDDDDSIADFLNSDEEEDRVSLQNLKNLGESATLRSLLLNPHLRQLMVNLDQGEDKAKLMRAYMQEPLFVEFADCCLGIVEPSQNEES

SEQ ID NO: 1518 - protein, 305 aa, Homo sapiens
MGIQTSPVLLASLGVGLVTLLGLAVGSYLVRRSRRPQVTLLDPNEKYLLRLLDKTTVSHNTKRFRFALPTAHHTLGLPVGKHIYLSTRIDGSLVIRPYTPVTSDEDQGYVDLVIKVYLKGVHPKFPEGGKMSQYLDSLKVGDVVEFRGPSGLLTYTGKGHFNIQPNKKSPPEPRVAKKLGMIAGGTGITPMLQLIRAILKVPEDPTQCFLLFANQTEKDIILREDLEELQARYPNRFKLWFTLDHPPKDWAYSKGFVTADMIREHLPAPGDDVLVLLCGPPPMVQLACHPNLDKLGYSQKMRFTY

SEQ ID NO: 1519 - protein, 641 aa, Homo sapiens
MAKAAAIGIDLGTTYSCVGVFQHGKVEIIANDQGNRTTPSYVAFTDTERLIGDAAKNQVALNPQNTVFDAKRLIGRKFGDPVVQSDMKHWPFQVINDGDKPKVQVSYKGETKAFYPEEISSMVLTKMKEIAEAYLGYPVTNAVITVPAYFNDSQRQATKDAGVIAGLNVLRIINEPTAAAIAYGLDRTGKGERNVLIFDLGGGTFDVSILTIDDGIFEVKATAGDTHLGGEDFDNRLVNHFVEEFKRKHKKDISQNKRAVRRLRTACERAKRTLSSSTQASLEIDSLFEGIDFYTSITRARFEELCSDLFRSTLEPVEKALRDAKLDKAQIHDLVLVGGSTRIPKVQKLLQDFFNGRDLNKSINPDEAVAYGAAVQAAILMGDKSENVQDLLLLDVAPLSLGLETAGGVMTALIKRNSTIPTKQTQIFTTYSDNQPGVLIQVYEGERAMTKDNNLLGRFELSGIPPAPRGVPQIEVTFDIDANGILNVTATDKSTGKANKITITNDKGRLSKEEIERMVQEAEKYKAEDEVQRERVSAKNALESYAFNMKSAVEDEGLKGKISEADKKKVLDKCQEVISWLDANTLAEKDEFEHKRKELEQVCNPIISGLYQGAGGPGPGGFGAQGPKGGSGSGPTIEEVD

SEQ ID NO: 1520 - protein, 529 aa, Homo sapiens
MTSSRLWFSLLLAAAFAGRATALWPWPQNFQTSDQRYVLYPNNFQFQYDVSSAAQPGCSVLDEAFQRYRDLLFGSGSWPRPYLTGKRHTLEKNVLVVSVVTPGCNQLPTLESVENYTLTINDDQCLLLSETVWGALRGLETFSQLVWKSAEGTFFINKTEIEDFPRFPHRGLLLDTSRHYLPLSSILDTLDVMAYNKLNVFHWHLVDDPSFPYESFTFPELMRKGSYNPVTHIYTAQDVKEVIEYARLRGIRVLAEFDTPGHTLSWGPGIPGLLTPCYSGSEPSGTFGPVNPSLNNTYEFMSTFFLEVSSVFPDFYLHLGGDEVDFTCWKSNPEIQDFMRKKGFGEDFKQLESFYIQTLLDIVSSYGKGYVVWQEVFDNKVKIQPDTIIQVWREDIPVNYMKELELVTKAGFRALLSAPWYLNRISYGPDWKDFYVVEPLAFEGTPEQKALVIGGEACMWGEYVDNTNLVPRLWPRAGAVAERLWSNKLTSDLTFAYERLSHFRCELLRRGVQAQPLNVGFCEQEFEQT

SEQ ID NO: 1521 - protein, 406 aa, Homo sapiens
MGKVWKQQMYPQYATYYYPQYLQAKQSLVPAHPMAPPSPSTTSSNNNSSSSSNSGWDQLSKTNLYIRGLPPHTTDQDLVKLCQPYGKIVSTKAILDKTTNKCKGYGFVDFDSPAAAQKAVSALKASGVQAQMAKQQEQDPTNLYISNLPLSMDEQELENMLKPFGQVISTRILRDSSGTSRGVGFARMESTEKCEAVIGHFNGKFIKTPPGVSAPTEPLLCKFADGGQKKRQNPNKYIPNGRPWHREGEVRLAGMTLTYDPTTAAIQNGFYPSPYSIATNRMITQTSITPYIASPVSAYQVQSPSWMQPQPYILQHPGAVLTPSMEHTMSLQPASMISPLAQQMSHLSLGSTGTYMPATSAMQGAYLPQYAHMQTTAVPVEEASGQQQVAVETSNDHSPYTFQPNK

SEQ ID NO: 1522 - protein, 175 aa, Homo sapiens
MSSQIRQNYSTDVEAAVNSLVNLYLQASYTYLSLGFYFDRDDVALEGVSHFFRELAEEKREGYERLLKMQNQRGGRALFQDIKKPAEDEWGKTPDAMKAAMALEKKLNQALLDLHALGSARTDPHLCDFLETHFLDEEVKLIKKMGDHLTNLHRLGGPEAGLGEYLFERLTLKHD

SEQ ID NO: 1523 - protein, 897 aa, Homo sapiens
TPGLAPRVAPSRAEPSGAGGASGITRVAVPEQLQSIEGWRGAHTVHGAGGQGGQGAVVMAQFDTEYQRLEASYSDSPPGEEDLLVHVAEGSKSPWHHIENLDLFFSRVYNLHQKNGFTCMLIGEIFELMQFLFVVAFTTFLVSCVDYDILFANKMVNHSLHPTEPVKVTLPDAFLPAQVCSARIQENGSLITILVIAGVFWIHRLIKFIYNICCYWEIHSFYLHALRIPMSALPYCTWQEVQARIVQTQKEHQICIHKRELTELDIYHRILRFQNYMVALVNKSLLPLRFRLPGLGEAVFFTRGLKYNFELILFWGPGSLFLNEWSLKAEYKRGGQRLELAQRLSNRILWIGIANFLLCPLILIWQILYAFFSYAEVLKREPGALGARCWSLYGRCYLRHFNELEHELQSRLNRGYKPASKYMNCFLSPLLTLLAKNGAFFAGSILAVLIALTIYDEDVLAVEHVLTTVTLLGVTVTVCRSFIPDQHMVFCPEQLLRVILAHIHYMPDHWQGNAHRSQTRDEFAQLFQYKAVFILEELLSPIVTPLILIFCLRPRALEIIDFFRNFTVEVVGVGDTCSFAQMDVRQHGHPQWLSAGQTEASVYQQAEDGKTELSLMHFAITNPGWQPPRESTAFLGFLKEQVQRDGAAASLAQGGLLPENALFTSIQSLQSESEPLSLIANVVAGSSCRGPPLPRDLQGSRHRAEVASALRSFSPLQPGQAPTGRAHSTMTGSGVDARTASSGSSVWEGQLQSLVLSEYASTEMSLHALYMHQLHKQQAQAEPERHVWHRRESDESGESAPDEGGEGARAPQSIPRSASYPCAAPRPGAPETTALHGGFQRRYGGITDPGTVPRVPSHFSRLPLGGWAEDGQSASRHPEPVPEEGSEDELPPQVHKV

SEQ ID NO: 1524 - protein, 151 aa, Homo sapiens [sequence omitted]

SEQ ID NO: 1525 - protein, 377 aa, Homo sapiens [sequence omitted]

SEQ ID NO: 1526 - protein, 316 aa, Homo sapiens [sequence omitted]

SEQ ID NO: 1527 - protein, 503 aa, Homo sapiens [sequence omitted]

SEQ ID NO: 1528 - protein, 629 aa, Homo sapiens
MPRYGASLRQSCPRSGREQGQDGTAGAPGLLWMGLVLALALALALALSDSRVLWAPAEAHPLSPQGHPARLHRIVPRLRDVFGWGNLTCPICKGLFTAINLGLKKEPNVARVGSVAIKLCNLLKIAPPAVCQSIVHLFEDDMVEVWRRSVLSPSEACGLLLGSTCGHWDIFSSWNISLPTVPKPPPKPPSPPAPGAPVSRILFLTDLHWDHDYLEGTDPDCADPLCCRRGSGLPPASRPGAGYWGEYSKCDLPLRTLESLLSGLGPAGPFDMVYWTGDIPAHDVWHQTRQDQLRALTTVTALVRKFLGPVPVYPAVGNHESIPVNSFPPPFIEGNHSSRWLYEAMAKAWEPWLPAEALRTLRIGGFYALSPYPGLRLISLNMNFCSRENFWLLINSTDPAGQLQWLVGELQAAEDRGDKVHIIGHIPPGHCLKSWSWNYYRIVARYENTLAAQFFGHTHVDEFEVFYDEETLSRPLAVAFLAPSATTYIGLNPGYRVYQIDGNYSRSSHVVLDHETYILNLTQANIPGAIPHWQLLYRARETYGLPNTLPTAWHNLVYRMRGDMQLFQTFWFLYHKGHPPSEPCGTPCRLATLCAQLSARADSPALCRHLMPDGSLPEAQSLWPRPLFC

SEQ ID NO: 1529 - protein, 317 aa, Homo sapiens [sequence omitted]

SEQ ID NO: 1530 - protein, 128 aa, Homo sapiens
MTEADVNPKAYPLADAHLTKKLLDLVQQSCNYKQLRKGANEATKTLNRGISEFIVMAADAEPLEIILHLPLLCEDKNVPYVFVRSKQALGRACGVSRPVIACSVTIKEGSQLKQQIQSIQQSIERLLV

SEQ ID NO: 1531 - protein, 543 aa, Homo sapiens
MMPTPVILLKEGTDSSQGIPQLVSNISACQVIAEAVRTTLGPRGMDKLIVDGRGKATISNDGATILKLLDVVHPAAKTLVDIAKSQDAEVGDGTTSVTLLAAEFLKQVKPYVEEGLHPQIIIRAFRTATQLAVNKIKEIAVTVKKADKVEQRKLLEKCAMTALSSKLISQQKAFFAKMVVDAVMMLDDLLQLKMIGIKKVQGGALEDSQLVAGVAFKKTFSYAGFEMQPKKYHNPKIALLNVELELKAEKDNAEIRVHTVEDYQAIVDAEWNILYDKLEKIHHSGAKVVLSKLPIGDVATQYFADRDMFCAGRVPEEDLKRTMMACGGSIQTSVNALSADVLGRCQVFEETQIGGERYNFFTGCPKAKTCTFILRGGAEQFMEETERSLHDAIMIVRRAIKNDSVVAGGGAIEMELSKYLRDYSRTIPGKQQLLIGAYAKALEIIPRQLCDNAGFDATNILNKLRARHAQGGTWYGVDINNEDIADNFEAFVWEPAMVRINALTAASEAACLIVSVDETIKNPRSTVDAPTAAGRGRGRGRPH

SEQ ID NO: 1532 - protein, 705 aa, Homo sapiens
MWLLYLLVPALFCRAGGSIPIPQKLFGEVTSPLFPKPYPNNFETTTVITVPTGYRVKLVFQQFDLEPSEGCFYDYVKISADKKSLGRFCGQLGSPLGNPPGKKEFMSQGNKMLLTFHTDFSNEENGTIMFYKGFLAYYQAVDLDECASRSKSGEEDPQPQCQHLCHNYVGGYFCSCRPGYELQEDRHSCQAECSSELYTEASGYISSLEYPRSYPPDLRCNYSIRVERGLTLHLKFLEPFDIDDHQQVHCPYDQLQIYANGKNIGEFCGKQRPPDLDTSSNAVDLLFFTDESGDSRGWKLRYTTEIIKCPQPKTLDEFTIIQNLQPQYQFRDYFIATCKQGYQLIEGNQVLHSFTAVCQDDGTWHRAMPRCKIKDCGQPRNLPNGDFRYTTTMGVNTYKARIQYYCHEPYYKMQTRAGSRESEQGVYTCTAQGIWKNEQKGEKIPRCLPVCGKPVNPVEQRQRIIGGQKAKMGNFPWQVFTNIHGRGGGALLGDRWILTAAHTLYPKEHEAQSNASLDVFLGHTNVEELMKLGNHPIRRVSVHPDYRQDESYNFEGDIALLELENSVTLGPNLLPICLPDNDTFYDLGLMGYVSGFGVMEEKIAHDLRFVRLPVANPQACENWLRGKNRMDVFSQNMFCAGHPSLKQDACQGDSGGVFAVRDPNTDRWVATGIVSWGIGCSRGYGFYTKVLNYVDWIKKEMEEED

SEQ ID NO: 1533 - protein, 688 aa, Homo sapiens
MWCIVLFSLLAWVYAEPTMYGEILSPNYPQAYPSEVEKSWDIEVPEGYGIHLYFTHLDIELSENCAYDSVQIISGDTEEGRLCGQRSSNNPHSPIVEEFQVPYNKLQVIFKSDFSNEERFTGFAAYYVATDINECTDFVDVPCSHFCNNFIGGYFCSCPPEYFLHDDMKNCGVNCSGDVFTALIGEIASPNYPKPYPENSRCEYQIRLEKGFQVVVTLRREDFDVEAADSAGNCLDSLVFVAGDRQFGPYCGHGFPGPLNIETKSNALDIIFQTDLTGQKKGWKLRYHGDPMPCPKEDTPNSVWEPAKAKYVFRDVVQITCLDGFEVVEGRVGATSFYSTCQSNGKWSNSKLKCQPVDCGIPESIENGKVEDPESTLFGSVIRYTCEEPYYYMENGGGGEYHCAGNGSWVNEVLGPELPKCVPVCGVPREPFEEKQRIIGGSDADIKNFPWQVFFDNPWAGGALINEYWVLTAAHVVEGNREPTMYVGSTSVQTSRLAKSKMLTPEHVFIHPGWKLLEVPEGRTNFDNDIALVRLKDPVKMGPTVSPICLPGTSSDYNLMDGDLGLISGWGRTEKRDRAVRLKAARLPVAPLRKCKEVKVEKPTADAEAYVFTPNMICAGGEKGMDSCKGDSGGAFAVQDPNDKTKFYAAGLVSWGPQCGTYGLYTRVKNYVDWIMKTMQENSTPRED

SEQ ID NO: 1534 - protein, 400 aa, Homo sapiens
AGDSRDMSREMQDVDLAEVKPLVEKGETITGLLQEFDVQEQDIETLHGSVHVTLCGTPKGNRPVILTYHDIGMNHKTCYNPLFNYEDMQEITQHFAVCHVDAPGQQDGAASFPAGYMYPSMDQLAEMLPGVLQQFGLKSIIGMGTGAGAYILTRFALNNPEMVEGLVLINVNPCAEGWMDWAASKISGWTQALPDMVVSHLFGKEEMQSNVEVVHTYRQHIVNDMNPGNLHLFINAYNSRRDLEIERPMPGTHTVTLQCPALLVVGDSSPAVDAVVECNSKLDPTKTTLLKMADCGGLPQISQPAKLAEAFKYFVQGMGYMPSASMTRLMRSRTASGSSVTSLDGTRSRSHTSEGTRSRSHTSEGTRSRSHTSEGAHLDITPNSGAAGNSAGPKSMEVSC

SEQ ID NO: 1535 - protein, 149 aa, Homo sapiens [sequence omitted]

SEQ ID NO: 1536 - protein, 417 aa, Homo sapiens
MLLSVPLLLGLLGLAVAEPAVYFKEQFLDGDGWTSRWIESKHKSDFGKFVLSSGKFYGDEEKDKGLQTSQDARFYALSASFEPFSNKGQTLVVQFTVKHEQNIDCGGGYVKLFPNSLDQTDMHGDSEYNIMFGPDICGPGTKKVHVIFNYKGKNVLINKDIRCKDDEFTHLYTLIVRPDNTYEVKIDNSQVESGSLEDDWDFLPPKKIKDPDASKPEDWDERAKIDDPTDSKPEDWDKPEHIPDPDAKKPEDWDEEMDGEWEPPVIQNPEYKGEWKPRQIDNPDYKGTWIHPEIDNPEYSPDPSIYAYDNFGVLGLDLWQVKSGTIFDNFLITNDEAYAEEFGNETWGVTKAAEKQMKDKQDEEQRLKEEEEDKKRKEEEEAEDKEDDEDKDEDEEDEEDKEEDEEEDVPGQAKDEL

SEQ ID NO: 1537 - protein, 101 aa, Homo sapiens
MACPLEKALDVMVSTFHKYSGKEGDKFKLNKSELKELLTRELPSFLGKRTDEAAFQKLMSNLDSNRDNEVDFQEYCVFLSCIAMMCNEFFEGFPDKQPRKK

SEQ ID NO: 1538 - protein, 128 aa, Homo sapiens
MGIQGGSVLFGLLLVLAVFCHSGHSLQCYNCPNPTADCKTAVNCSSDFDACLITKAGLQVYNKCWKFEHCNFNDVTTRLRENELTYYCCKKDLCNFNEQLENGGTSLSEKTVLLLVTPFLAAAWSLHP

SEQ ID NO: 1539 - protein, 165 aa, Homo sapiens
MEMFQGLLLLLLLSMGGTWASKEPLRPRCRPINATLAVEKEGCPVCITVNTTICAGYCPTMTRVLQGVLPALPQVVCNYRDVRFESIRLPGCPRGVNPVVSYAVALSCQCALCRRSTTDCGGPKDHPLTCDDPRFQDSSSSKAPPPSLPSPSRLPGPSDTPILPQ

SEQ ID NO: 1540 - protein, 304 aa, Homo sapiens
MIYTMKKVHALWASVCLLLNLAPAPLNADSEEDEEHTIITDTELPPLKLMHSFCAFKADDGPCKAIMKRFFFNIFTRQCEEFIYGGCEGNQNRFESLEECKKMCTRDNANRIIKTTLQQEKPDFCFLEEDPGICRGYITRYFYNNQTKQCERFKYGGCLGNMNNFETLEECKNICEDGPNGFQVDNYGTQLNAVNNSLTPQSTKVPSLFEFHGPSWCLTPADRGLCRANENRFYYNSVIGKCRPFKYSGCGGNENNFTSKQECLRACKKGFIQRISKGGLIKTKRKRKKQRVKIAYEEIFVKNM

SEQ ID NO: 1541 - protein, 211 aa, Homo sapiens [sequence omitted]

SEQ ID NO: 1542 - protein, 250 aa, Homo sapiens
MTLSPLLLFLPPLLLLLDVPTAAVQASPLQALDFFGNGPPVNYKTGNLYLRGPLKKSNAPLVNVTLYYEALCGGCRAFLIRELFPTWLLVMEILNVTLVPYGNAQEQNVSGRWEFKCQHGEEECKFNKVEACVLDELDMELAFLTIVCMEEFEDMERSLPLCLQLYAPGLSPDTIMECAMGDRGMQLMHANAQRTDALQPPHEYVPWVTVNGKPLEDQTQLLTLVCQLYQGKKPDVCPSSTSSLRSVCFK

SEQ ID NO: 1543 - protein, 175 aa, Homo sapiens
MDIAIHHPWIRRPFFPFHSPSRLFDQFFGEHLLESDLFPTSTSLSPFYLRPPSFLRAPSWFDTGLSEMRLEKDRFSVNLDVKHFSPEELKVKVLGDVIEVHGKHEERQDEHGFISREFHRKYRIPADVDPLTITSSLSSDGVLTVNGPRKQVSGPERTIPITREEKPAVTAAPKK

SEQ ID NO: 1544 - protein, 215 aa, Homo sapiens
MSSSEEVSWISWFCGLRGNEFFCEVDEDYIQDKFNLTGLNEQVPHYRQALDMILDLEPDEELEDNPNQSDLIEQAAEMLYGLIHARYILTNRGIAQMLEKYQQGDFGYCPRVYCENQPMLPIGLSDIPGEAMVKLYCPKCMDVYTPKSSRHHHTDGAYFGTGFPHMLFMVHPEYRPKRPANQFVPRLYGFKIHAMAYQLQLQAASNFKSPVKTIR

SEQ ID NO: 1545 - protein, 2384 aa, Homo sapiens
KGFFPQLRREANLVATCLPVRASLPHRLNMLRGPGPGLLLLAVQCLGTAVPSTGASKSKRQAQQMVQPQSPVAVSQSKPGCYDNGKHYQINQQWERTYLGNALVCTCYGGSRGFNCESKPEAEETCFDKYTGNTYRVGDTYERPKDSMIWDCTCIGAGRGRISCTIANRCHEGGQSYKIGDTWRRPHETGGYMLECVCLGNGKGEWTCKPIAEKCFDHAAGTSYVVGETWEKPYQGWMMVDCTCLGEGSGRITCTSRNRCNDQDTRTSYRIGDTWSKKDNRGNLLQCICTGNGRGEWKCERHTSVQTTSSGSGPFTDVRAAVYQPQPHPQPPPYGHCVTDSGVVYSVGMQWLKTQGNKQMLCTCLGNGVSCQETAVTQTYGGNSNGEPCVLPFTYNGRTFYSCTTEGRQDGHLWCSTTSNYEQDQKYSFCTDHTVLVQTRGGNSNGALCHFPFLYNNHNYTDCTSEGRRDNMKWCGTTQNYDADQKFGFCPMAAHEEICTTNEGVMYRIGDQWDKQHDMGHMMRCTCVGNGRGEWTCIAYSQLRDQCIVDDITYNVNDTFHKRHEEGHMLNCTCFGQGRGRWKCDPVDQCQDSETGTFYQIGDSWEKYVHGVRYQCYCYGRGIGEWHCQPLQTYPSSSGPVEVFITETPSQPNSHPIQWNAPQPSHISKYILRWRPKNSVGRWKEATIPGHLNSYTIKGLKPGVVYEGQLISIQQYGHQEVTRFDFTTTSTSTPVTSNTVTGETTPFSPLVATSESVTEITASSFVVSWVSASDTVSGFRVEYELSEEGDEPQYLDLPSTATSVNIPDLLPGRKYIVNVYQISEDGEQSLILSTSQTTAPDAPPDPTVDQVDDTSIVVRWSRPQAPITGYRIVYSPSVEGSSTELNLPETANSVTLSDLQPGVQYNITIYAVEENQESTPVVIQQETTGTPRSDTVPSPRDLQFVEVTDVKVTIMWTPPESAVTGYRVDVIPVNLPGEHGQRLPISRNTFAEVTGLSPGVTYYFKVFAVSHGRESKPLTAQQTTKLDAPTNLQFVNETDSTVLVRWTPPRAQITGYRLTVGLTRRGQPRQYNVGPSVSKYPLRNLQPASEYTVSLVAIKGNQESPKATGVFTTLQPGSSIPPYNTEVTETTIVITWTPAPRIGFKLGVRPSQGGEAPREVTSDSGSIVVSGLTPGVEYVYTIQVLRDGQERDAPIVNKVVTPLSPPTNLHLEANPDTGVLTVSWERSTTPDITGYRITTTPTNGQQGNSLEEVVHADQSSCTFDNLSPGLEYNVSVYTVKDDKESVPISDTIIPAVPPPTDLRFTNIGPDTMRVTWAPPPSIDLTNFLVRYSPVKNEEDVAELSISPSDNAVVLTNLLPGTEYVVSVSSVYEQHESTPLRGRQKTGLDSPTGIDFSDITANSFTVHWIAPRATITGYRIRHHPEHFSGRPREDRVPHSRNSITLTNLTPGTEYVVSIVALNGREESPLLIGQQSTVSDVPRDLEVVAATPTSLLISWDAPAVTVRYYRITYGETGGNSPVQEFTVPGSKSTATISGLKPGVDYTITVYAVTGRGDSPASSKPISINYRTEIDKPSQMQVTDVQDNSISVKWLPSSSPVTGYRVTTTPKNGPGPTKTKTAGPDQTEMTIEGLQPTVEYVVSVYAQNPSGESQPLVQTAVTNIDRPKGLAFTDVDVDSIKIAWESPQGQVSRYRVTYSSPEDGIHELFPAPDGEEDTAELQGLRPGSEYTVSVVALHDDMESQPLIGTQSTAIPAPTDLKFTQVTPTSLSAQWTPPNVQLTGYRVRVTPKEKTGPMKEINLAPDSSSVVVSGLMVATKYEVSVYALKDTLTSRPAQGVVTTLENVSPPRRARVTDATETTITISWRTKTETITGFQVDAVPANGQTPIQRTIKPDVRSYTITGLQPGTDYKIYLYTLNDNARSSPVVIDASTAIDAPSNLRFLATTPNSLLVSWQPPRARITGYIIKYEKPGSPPREVVPRPRPGVTEATITGLEPGTEYTIYVIALKNNQKSEPLIGRKKTDELPQLVTLPHPNLHGPEILDVPSTVQKTPFVTHPGYDTGNGIQLPGTSGQQPSVGQQMIFEEHGFRRTTPPTTATPIRHRPRPYPPNVGQEALSQTTISWAPFQDTSEYIISCHPVGTDEEPLQFRVPGTSTSATLTGLTRGATYNIIVEALKDQQRHKVREEVVTVGNSVNEGLNQPTDDSCFDPYTVSHYAVGDEWERMSESGFKLLCQCLGFGSGHFRCDSSRWCHDNGVNYKIGEKWDRQGENGQMMSCTCLGNGKGEFKCDPHEATCYDDGKTYHVGEQWQKEYLGAICSCTCFGGQRGWRCDNCRRPGGEPSPEGTTGQSYNQYSQRYHQRTNTNVNCPIECFMPLDVQADREDSRE

SEQ ID NO: 1546 - protein, 521 aa, Homo sapiens
MLAKGLPPRSVLVKGYQTFLSAPREGLGRLRVPTGEGAGISTRSPRPFNEIPSPGDNGWLNLYHFWRETGTHKVHLHHVQNFQKYGPIYREKLGNVESVYVIDPEDVALLFKSEGPNPERFLIPPWVAYHQYYQRPIGVLLKKSAAWKKDRVALNQEVMAPEATKNFLPLLDAVSRDFVSVLHRRIKKAGSGNYSGDISDDLFRFAFESITNVIFGERQGMLEEVVNPEAQRFIDAIYQMFHTSVPMLNLPPDLFRLFRTKTWKDHVAAWDVIFSKADIYTQNFYWELRQKGSVHHDYRGMLYRLLGDSKMSFEDIKANVTEMLAGGVDTTSMTLQWHLYEMARNLKVQDMLRAEVLAARHQAQGDMATMLQLVPLLKASIKETLRLHPISVTLQRYLVNDLVLRDYMIPAKTLVQVAIYALGREPTFFFDPENFDPTRWLSKDKNITYFRNLGFGWGVRQCLGRRIAELEMTIFLINMLENFRVEIQHLSDVGTTFNLILMPEKPISFTFWPFNQEATQQ

SEQ ID NO: 1547 - protein, 111 aa, Homo sapiens
MIWRGRSTYRPRPRRSVPPPELIGPMLEPGDEEPQQEEPPTESRDPAPGQEREEDQGAAETQVPDLEADLQELSQSKTGGECGNGPDDQGKILPKSEQFKMPEGGDRQPQV

SEQ ID NO: 1548 - protein, 462 aa, Homo sapiens
MGKEKTHINIVVIGHVDSGKSTTTGHLIYKCGGIDKRTIEKFEKEAAEMGKGSFKYAWVLDKLKAERERGITIDISLWKFETSKYYVTIIDAPGHRDFIKNMITGTSQADCAVLIVAAGVGEFEAGISKNGQTREHALLAYTLGVKQLIVGVNKMDSTEPPYSQKRYEEIVKEVSTYIKKIGYNPDTVAFVPISGWNGDNMLEPSANMPWFKGWKVTRKDGNASGTTLLEALDCILPPTRPTDKPLRLPLQDVYKIGGIGTVPVGRVETGVLKPGMVVTFAPVNVTTEVKSVEMHHEALSEALPGDNVGFNVKNVSVKDVRRGNVAGDSKNDPPMEAAGFTAQVIILNHPGQISAGYAPVLDCHTAHIACKFAELKEKIDRRSGKKLEDGPKFLKSGDAAIVDMVPGKPMCVESFSDYPPLGRFAVRDMRQTVAVGVIKAVDKKAAGAGKVTKSAQKAQKAK

SEQ ID NO: 1549 - protein, 437 aa, Homo sapiens
MSWSLHPRNLILYFYALLFLSSTCVAYVATRDNCCILDERFGSYCPTTCGIADFLSTYQTKVDKDLQSLEDILHQVENKTSEVKQLIKAIQLTYNPDESSKPNMIDAATLKSRKMLEEIMKYEASILTHDSSIRYLQEIYNSNNQKIVNLKEKVAQLEAQCQEPCKDTVQIHDITGKDCQDIANKGAKQSGLYFIKPLKANQQFLVYCEIDGSGNGWTVFQKRLDGSVDFKKNWIQYKEGFGHLSPTGTTEFWLGNEKIHLISTQSAIPYALRVELEDWNGRTSTADYAMFKVGPEADKYRLTYAYFAGGDAGDAFDGFDFGDDPSDKFFTSHNGMQFSTWDNDNDKFEGNCAEQDGSGWWMNKCHAGHLNGVYYQGGTYSKASTPNGYDNGIIWATWKTRWYSMKKTTMKIIPFNRLTIGEGQQHHLGGAKQAGDV

SEQ ID NO: 1550 - protein, 465 aa, Homo sapiens
MTGRAMDPLPAAAVGAAAEAEADEEADPPASDLPTPQAIEPQAIVQQVPAPSRMQMPQGNPLLLSHTLQELLARDTVQVELIPEKKGLFLKHVEYEVSSQRFKSSVYRRYNDFVVFQEMLLHKFPYRMVPALPPKRMLGADREFIEARRRALKRFVNLVARHPLFSEDVVLKLFLSFSGSDVQNKLKESAQCVGDEFLNCKLATRAKDFLPADIQAQFAISRELIRNIYNSFHKLRDRAERIASRAIDNAADLLIFGKELSAIGSDTTPLPSWAALNSSTWGSLKQALKGLSVEFALLADKAAQQGKQEENDVVEKLNLFLDLLQSYKDLCERHEKGVLHKHQRALHKYSLMKRQMMSATAQNREPESVEQLESRIVEQENAIQTMELRNYFSLYCLHQETQLIHVYLPLTSHILRAFVNSQIQGHKEMSKVWNDLRPKLSCLFAGPHSTLTPPCSPPEDGLCPH

SEQ ID NO: 1551 - protein, 222 aa, Homo sapiens
MKLPLLLALLFGAVSALHLRSETSTFETPLGAKTLPEDEETPEQEMEETPCRELEEEEEWGSGSEDASKKDGAVESISVPDMVDKNLTCPEEEDTVKVVGIPGCQTCRYLLVRSLQTFSQAWFTCRRCYRGNLVSIHNFNINYRIQCSVSALNQGQVWIGGRITGSGRCRRFQWVDGSRWNFAYWAAHQPWSRGGHCVALCTRGGYWRRAHCLRRLPFICSY

SEQ ID NO: 1552 - protein, 180 aa, Homo sapiens
MLCLLLTLGVALVCGVPAMDIPQTKQDLELPKLAGTWHSMAMATNNISLMATLKAPLRVHITSLLPTPEDNLEIVLHRWENNSCVEKKVLGEKTENPKKFKINYTVANEATLLDTDYDNFLFLCLQDTTTPIQSMMCQYLARVLVEDDEIMQGFIRAFRPLPRHLWYLLDLKQMEEPCRF

SEQ ID NO: 1553 - protein, 434 aa, Homo sapiens
MSILKIHAREIFDSRGNPTVEVDLFTSKGLFRAAVPSGASTGIYEALELRDNDKTRYMGKGVSKAVEHINKTIAPALVSKKLNVTEQEKIDKLMIEMDGTENKSKFGANAILGVSLAVCKAGAVEKGVPLYRHIADLAGNSEVILPVPAFNVINGGSHAGNKLAMQEFMILPVGAANFREAMRIGAEVYHNLKNVIKEKYGKDATNVGDEGGFAPNILENKEGLELLKTAIGKAGYTDKVVIGMDVAASEFFRSGKYDLDFKSPDDPSRYISPDQLADLYKSFIKDYPVVSIEDPFDQDDWGAWQKFTASAGIQVVGDDLTVTNPKRIAKAVNEKSCNCLLLKVNQIGSVTESLQACKLAQANGWGVMVSHRSGETEDTFIADLVVGLCTGQIKTGAPCRSERLAKYNQLLRIEEELGSKAKFAGRNFRNPLAK

SEQ ID NO: 1554 - protein, 502 aa, Homo sapiens
MLAAMGSLAAALWAVVHPRTLLLGTVAFLLAADFLKRRRPKNYPPGPWRLPFLGNFFLVDFEQSHLEVQLFVKKYGNLFSLELGDISAVLITGLPLIKEALIHMDQNFGNRPVTPMREHIFKKNGLIMSSGQAWKEQRRFTLTALRNFGLGKKSLEERIQEEAQHLTEAIKEENGQPFDPHFKINNAVSNIICSITFGERFEYQDSWFQQLLKLLDEVTYLEASKTCQLYNVFPWIMKFLPGPHQTLFSNWKKLKLFVSHMIDKHRKDWNPAETRDFIDAYLKEMSKHTGNPTSSFHEENLICSTLDLFFAGTETTSTTLRWALLYMALYPEIQEKVQAEIDRVIGQGQQPSTAARESMPYTNAVIHEVQRMGNIIPLNVPREVTVDTTLAGYHLPKGTMILTNLTALHRDPTEWATPDTFNPDHFLENGQFKKREAFMPFSIGKRACLGEQLARTELFIFFTSLMQKFTFRPPNNEKLSLKFRMGITISPVSHRLCAVPQV

SEQ ID NO: 1555 - protein, 264 aa, Homo sapiens [sequence omitted]

SEQ ID NO: 1556 - protein, 419 aa, Homo sapiens
ARGFNATYHVRGYCLPWDRPCGLGSGLGAGEGLGERCYSEAQRCDGSWDCADGTDEEDCPGCPPGHFPCGAAGTSGATACYLPADRCNYQTFCADGADERRCRHCQPGNFRCRDEKCVYETWVCDGQPDCADGSDEWDCSYVLPRKVITAAVIGSLVCGLLLVIALGCTCKLYAIRTQEYSIFAPLSRMEAEIVQQQAPPSYGQLIAQGAIPPVEDFPTENPNDNSVLGNLRSLLQILRQDMTPGGGPGARRRQRGRLMRRLVRRLRRWGLLPRTNTPARASEARSQVTPSAAPLEALDGGTGPAREGGAVGGQDGEQAPPLPIKAPLPSASTSPAPTTVPEAPGPLPSLPLEPSLLSGVVQALRGRLLPSLGPPGPTRSPPGPHTAVLALEDEDDVLLVPLAEPGVWVAEAEDEPLLT

SEQ ID NO: 1557 - protein, 952 aa, Homo sapiens [sequence omitted]

SEQ ID NO: 1558 - protein, 147 aa, Homo sapiens
MGHFTEEDKATITSLWGKVNVEDAGGETLGRLLVVYPWTQRFFDSFGNLSSASAIMGNPKVKAHGKKVLTSLGDAIKHLDDLKGTFAQLSELHCDKLHVDPENFKLLGNVLVTVLAIHFGKEFTPEVQASWQKMVTGVASALSSRYH

SEQ ID NO: 1559 - protein, 836 aa, Homo sapiens
MARLGNCSLTWAALIILLLPGSLEECGHISVSAPIVHLGDPITASCIIKQNCSHLDPEPQILWRLGAELQPGGRQQRLSDGTQESIITLPHLNHTQAFLSCCLNWGNSLQILDQVELRAGYPPAIPHNLSCLMNLTTSSLICQWEPGPETHLPTSFTLKSFKSRGNCQTQGDSILDCVPKDGQSHCCIPRKHLLLYQNMGIWVQAENALGTSMSPQLCLDPMDVVKLEPPMLRTMDPSPEAAPPQAGCLQLCWEPWQPGLHINQKCELRHKPQRGEASWALVGPLPLEALQYELCGLLPATAYTLQIRCIRWPLPGHWSDWSPSLELRTTERAPTVRLDTWWRQRQLDPRTVQLFWKPVPLEEDSGRIQGYVVSWRPSGQAGAILPLCNTTELSCTFHLPSEAQEVALVAYNSAGTSRPTPVVFSESRGPALTRLHAMARDPHSLWVGWEPPNPWPQGYVIEWGLGPPSASNSNKTWRMEQNGRATGFLLKENIRPFQLYEIIVTPLYQDTMGPSQHVYAYSQEMAPSHAPELHLKHIGKTWAQLEWVPEPPELGKSPLTHYTIFWTNAQNQSFSAILNASSRGFVLHGLEPASLYHIHLMAASQAGATNSTVLTLMTLTPEGSELHIILGLFGLLLLLTCLCGTAWLCCSPNRKNPLWPSVPDPAHSSLGSWVPTIMEEDAFQLPGLGTPPITKLTVLEEDEKKPVPWESHNSSETCGLPTLVQTYVLQGDPRAVSTQPQSQSGTSDQVLYGQLLGSPTSPGPGHYLRCDSTQPLLAGLTPSPKSYENLWFQASPLGTLVTPAPSQEDDCVFGPLLNFPLLQGIRVHGMEALGSF

SEQ ID NO: 1560 - protein, 291 aa, Homo sapiens
MQRARPTLWAAALTLLVLLRGPPVARAGASSGGLGPVVRCEPCDARALAQCAPPPAVCAELVREPGCGCCLTCALSEGQPCGIYTERCGSGLRCQPSPDEARPLQALLDGRGLCVNASAVSRLRAYLLPAPPAPGNASESEEDRSAGSVESPSVSSTHRVSDPKFHPLHSKIIIIKKGHAKDSQRYKVDYESQSTDTQNFSSESKRETEYGPCRREMEDTLNHLKFLNVLSPRGVHIPNCDKKGFYKKKQCRPSKGRKRGFCWCVDKYGQPLPGYTTKGKEDVHCYSMQSK

SEQ ID NO: 1561 - protein, 259 aa, Homo sapiens
MSEVPVARVWLVLLLLTVQVGVTAGAPWQCAPCSAEKLALCPPVSASCSEVTRSAGCGCCPMCALPLGAACGVATARCARGLSCRALPGEQQPLHALTRGQGACVQESDASAPHAAEAGSPESPESTEITEEELLDNFHLMAPSEEDHSILWDAISTYDGSKALHVTNIKKWKEPCRIELYRVVESLAKAQETSGEEISKFYLPNCNKNGFYHSRQCETSMDGEAGLCWCVYPWNGKRIPGSPEIRGDPNCQIYFNVQN

SEQ ID NO: 1562 - protein, 136 aa, Homo sapiens
MARTKQTARKSTGGKAPRKQLATKAARKSAPSTGGVKKPHRYRPGTVALREIRRYQKSTELLIRKLPFQRLVREIAQDFKTDLRFQSAAIGALQEASEAYLVGLFEDTNLCAIHAKRVTIMPKDIQLARRIRGERA

SEQ ID NO: 1563 - protein, 358 aa, Homo sapiens [sequence omitted]

SEQ ID NO: 1564 - protein, 371 aa, Homo sapiens
MAATCEISNIFSNYFSAMYSSEDSTLASVPPAATFGADDLVLTLSNPQMSLEGTEKASWLGEQPQFWSKTQVLDWISYQVEKNKYDASAIDFSRCDMDGATLCNCALEELRLVFGPLGDQLHAQLRDLTSSSSDELSWIIELLEKDGMAFQEALDPGPFDQGSPFAQELLDDGQQASPYHPGSCGAGAPSPGSSDVSTAGTGASRSSHSSDSGGSDVDLDPTDGKLFPSDGFRDCKKGDPKHGKRKRGRPRKLSKEYWDCLEGKKSKHAPRGTHLWEFIRDILIHPELNEGLMKWENRHEGVFKFLRSEAVAQLWGQKKKNSNMTYEKLSRAMRYYYKREILERVDGRRLVYKFGKNSSGWKEEEVLQSRN

SEQ ID NO: 1565 - protein, 338 aa, Homo sapiens
MVVMAPRTLFLLLSGALTLTETWAGSHSMRYFSAAVSRPGRGEPRFIAMGYVDDTQFVRFDSDSACPRMEPRAPWVEQEGPEYWEEETRNTKAHAQTDRMNLQTLRGYYNQSEASSHTLQWMIGCDLGSDGRLLRGYEQYAYDGKDYLALNEDLRSWTAADTAAQISKRKCEAANVAEQRRAYLEGTCVEWLHRYLENGKEMLQRADPPKTHVTHHPVFDYEATLRCWALGFYPAEIILTWQRDGEDQTQDVELVETRPAGDGTFQKWAAVVVPSGEEQRYTCHVQHEGLPEPLMLRWKQSSLPTIPIMGIVAGLVVLAAVVTGAAVAAVLWRKKSSD

SEQ ID NO: 1566 - protein, 165 aa, Homo sapiens
MGWDLTVKMLAGNEFQVSLSSSMSVSELKAQITQKIGVHAFQQRLAVHPSGVALQDRVPLASQGLGPGSTVLLVVDKCDEPLSILVRNNKGRSSTYEVRLTQTVAHLKQQVSGLEGVQDDLFWLTFEGKPLEDQLPLGEYGLKPLSTVFMNLRLRGGGTEPGGRS

SEQ ID NO: 1567 - protein, 539 aa, Homo sapiens
AAPGARARRRAPAGPGGRAAPENPGGVLSVELPGLLAQLARSFALLLPVYALGYLGLSFSWVLLALALLAWCRRSRGLKALRLCRALALLEDEERVVRLGVRACDLPAWVHFPDTERAEWLNKTVKHMWPFICQFIEKLFRETIEPAVRGANTHLSTFSFTKVDVGQQPLRINGVKVYTENVDKRQIILDLQISFVGNCEIDLEIKRYFCRAGVKSIQIHGTMRVILEPLIGDMPLVGALSIFFLRKPLLEINWTGLTNLLDVPGLNGLSDTIILDIISNYLVLPNRITVPLVSEVQIAQLRFPVPKGVLRIHFIEAQDLQGKDTYLKGLVKGKSDPYGIIRVGNQIFQSRVIKENLSPKWNEVYEALVYEHPGQELEIELFDEDPDKDDFLGSLMIDLIEVEKERLLDEWFTLDEVPKGKLHLRLEWLTLMPNASNLDKVLTDIKADKDQANDGLSSALLILYLDSARNLPSNPLEFNPDVLKKTAVQRALKSGKKISSNPNPVVQMSVGHKAQESKIRYKTNEPVWEENFTFFIHNP

SEQ ID NO: 1568 - protein, 217 aa, Homo sapiens
MGSTVPRSASVLLLLLLLRRAEQPCGAELTFELPDNAKQCFHEEVEQGVKFSLDYQVITGGHYDVDCYVEDPQGNTIYRETKKQYDSFTYRAEVKGVYQFCFSNEFSTFSHKTVYFDFQVGDEPPILPDMGNRVTALTQMESACVTIHEALKTVIDSQTHYRLREAQDRARAEDLNSRVSYWSVGETIALFVVSFSQVLLLKSFFTEKRPISRAVHS

SEQ ID NO: 1569 - protein, 367 aa, Homo sapiens
MVMEVGTLDAGGLRALLGERAAQCLLLDCRSFFAFNAGHIAGSVNVRFSTIVRRRAKGAMGLEHIVPNAELRGRLLAGAYHAVVLLDERSAALDGAKRDGTLALAAGALCREARAAQVFFLKGGYEAFSASCPELCSKQSTPMGLSLPLSTSVPDSAESGCSSCSTPLYDQGGPVEILPFLYLGSAYHASRKDMLDALGITALINVSANCPNHFEGHYQYKSIPVEDNHKADISSWFNEAIDFIDSIKNAGGRVFVHCQAGISRSATICLAYLMRTNRVKLDEAFEFVKQRRSIISPNFSFMGQLLQFESQVLAPHCSAEAGSPAMAVLDRGTSTTTVFNFPVSIPVHSTNSALSYLQSPITTSPSC

SEQ ID NO: 1570 - protein, 135 aa, Homo sapiens [sequence omitted]

SEQ ID NO: 1571 - protein, 263 aa, Homo sapiens
MFRNQYDNDVTVWSPQGRIHQIEYAMEAVKQGSATVGLKSKTHAVLVALKRAQSELAAHQKKILHVDNHIGISIAGLTADARLLCNFMRQECLDSRFVFDRPLPVSRLVSLIGSKTQIPTQRYGRRPYGVGLLIAGYDDMGPHIFQTCPSANYFDCRAMSIGARSQSARTYLERHMSEFMECNLNELVKHGLRALRETLPAEQDLTTKNVSIGIVGKDLEFTIYDDDDVSPFLEGLEERPQRKAQPAQPADEPAEKADEPMEH

SEQ ID NO: 1572 - protein, 138 aa, Homo sapiens
MVSRTEGNIDDSLIGGNASAEGPEGEGTESTVITGVDIVMNHHLQETSFTKEAYKKYIKDYMKSIKGKLEEQRPERVKPFMTGAAEQIKHILANFKNYQFFIGENMNPDGMVALLDYREDGVTPYMIFFKDGLEMEKC

SEQ ID NO: 1573 - protein, 635 aa, Homo sapiens [sequence omitted]

SEQ ID NO: 1574 - protein, 527 aa, Homo sapiens
MENQEKASIAGHMFDVVVIGGGISGLSAAKLLTEYGVSVLVLEARDRVGGRTYTIRNEHVDYVDVGGAYVGPTQNRILRLSKELGIETYKVNVSERLVQYVKGKTYPFRGAFPPVWNPIAYLDYNNLWRTIDNMGKEIPTDAPWEAQHADKWDKMTMKELIDKICWTKTARRFAYLFVNINVTSEPHEVSALWFLWYVKQCGGTTRIFSVTNGGQERKFVGGSGQVSERIMDLLGDQVKLNHPVTHVDQSSDNIIIETLNHEHYECKYVINAIPPTLTAKIHFRPELPAERNQLIQRLPMGAVIKCMMYYKEAFWKKKDYCGCMIIEDEDAPISITLDDTKPDGSLPAIMGFILARKADRLAKLHKEIRKKKICELYAKVLGSQEALHPVHYEEKNWCEEQYSGGCYTAYFPPGIMTQYGRVIRQPVGRIFFAGTETATKWSGYMEGAVEAGERAAREVLNGLGKVTEKDIWVQEPESKDVPAVEITHTFWERNLPSVSGLLKIIGFSTSVTALGFVLYKYKLLPRS

SEQ ID NO: 1575 - protein, 365 aa, Homo sapiens [sequence omitted]

SEQ ID NO: 1576 - protein, 254 aa, Homo sapiens
MAISGVPVLGFFIIAVLMSAQESWAIKEEHVIIQAEFYLNPDQSGEFMFDFDGDEIFHVDMAKKETVWRLEEFGRFASFEAQGALANIAVDKANLEIMTKRSNYTPITNVPPEVTVLTNSPVELREPNVLICFIDKFTPPVVNVTWLRNGKPVTTGVSETVFLPREDHLFRKFHYLPFLPSTEDVYDCRVEHWGLDEPLLKHWEFDAPSPLPETTENVVCALGLTVGLVGIIIGTIFIIKGLRKSNAAERRGPL

SEQ ID NO: 1577 - protein, 152 aa, Homo sapiens
MANLERTFIAIKPDGVQRGLVGEIIKRFEQKGFRLVAMKFLRASEEHLKQHYIDLKDRPFFPGLVKYMNSGPVVAMVWEGLNVVKTGRVMLGETNPADSKPGTIRGDFCIQVGRNIIHGSDSVKSAEKEISLWFKPEELVDYKSCAHDWVYE

SEQ ID NO: 1578 - protein, 355 aa, Homo sapiens
HEAEKAVAAAAAAAETLKSESGLRVRGLLIRILVLSVSVCEWTVPDAMTLNGGGSGAGGSRGGGQERERRRGSTPWGPAPPLHRRSMPVDERDLQAALTPGALTAAAAGTGTQGPRLDWPEDSEDSLSSGGSDSDESVYKVLLLGAPGVGKSALARIFGGVEDGPEAEAAGHTYDRSIVVDGEEASLMVYDIWEQDGGRWLPGHCMAMGDAYVIVYSVTDKGSFEKASELRVQLRRARQTDDVPIILVGNKSDLVRSREVSVDEGRACAVVFDCKFIETSAALHHNVQALFEGVVRQIRLRRDSKEANARRQAGTRRRESLGKKAKRFLGRIVARNSRKMAFRAKSKSCHDLSVL

SEQ ID NO: 1579 - protein, 214 aa, Homo sapiens
MGRRPARCYRYCKNKPYPKSRFCRGVPDAKIRIFDLGRKKAKVDEFPLCGHMVSDEYEQLSSEALEAARICANKYMVKSCGKDGFHIRVRLHPFHVIRINKMLSCAGADRLQTGMRGAFGKPQGTVARVHIGQVIMSIRTKLQNKEHVIEALRRAKFKFPGRQKIHISKKWGFTKFNADEFEDMVAEKRLIPDGCGVKYIPSRGPLDKWRALHS

SEQ ID NO: 1580 - protein, 551 aa, Homo sapiens
MDELFPLIFPAEPAQASGPYVEIIEQPKQRGMRFRYKCEGRSAGSIPGERSTDTTKTHPTIKINGYTGPGTVRISLVTKDPPHRPHPHELVGKDCRDGFYEAELCPDRCIHSFQNLGIQCVKKRDLEQAISQRIQTNNNPFQVPIEEQRGDYDLNAVRLCFQVTVRDPSGRPLRLPPVLPHPIFDNRAPNTAELKICRVNRNSGSCLGGDEIFLLCDKVQKEDIEVYFTGPGWEARGSFSQADVHRQVAIVFRTPPYADPSLQAPVRVSMQLRRPSDRELSEPMEFQYLPDTDDRHRIEEKRKRTYETFKSIMKKSPFSGPTDPRPPPRRIAVPSRSSASVPKPAPQPYPFTSSLSTINYDEFPTMVFPSGQISQASALAPAPPQVLPQAPAPAPAPAMVSALAQAPAPVPVLAPGPPQAVAPPAPKPTQAGEGTLSEALLQLQFDDEDLGALLGNSTDPAVFTDLASVDNSEFQQLLNQGIPVAPHTTEPMLMEYPEAITRLVTGAQRPPDPAPAPLGAPGLPNGLLSGDEDFSSIADMDFSALLSQISS

SEQ ID NO: 1581 - protein, 402 aa, Homo sapiens [sequence omitted]

SEQ ID NO: 1582 - protein, 261 aa, Homo sapiens
MFEARLVQGSILKKVLEALKDLINEACWDISSSGVNLQSMDSSHVSLVQLTLRSEGFDTYRCDRNLAMGVNLTSMSKILKCAGNEDIITLRAEDNADTLALVFEAPNQEKVSDYEMKLMDLDVEQLGIPEQEYSCVVKMPSGEFARICRDLSHIGDAVVISCAKDGVKFSASGELGNGNIKLSQTSNVDKEEEAVTIEMNEPVQLTFALRYLNFFTKATPLSSTVTLSMSADVPLVVEYKIADMGHLKYYLAPKIEDEEGS

SEQ ID NO: 1583 - protein, 398 aa, Homo sapiens
MLRLYVLVMGVSAFTLQPAAHTGAARSCRFRGRHYKREFRLEGEPVALRCPQVPYWLWASVSPRINLTWHKNDSARTVPGEEETRMWAQDGALWLLPALQEDSGTYVCTTRNASYCDKMSIELRVFENTDAFLPFISYPQILTLSTSGVLVCPDLSEFTRDKTDVKIQWYKDSLLLDKDNEKFLSVRGTTHLLVHDVALEDAGYYRCVLTFAHEGQQYNITRSIELRIKKKKEETIPVIISPLKTISASLGSRLTIPCKVFLGTGTPLTTMLWWTANDTHIESAYPGGRVTEGPRQEYSENNENYIEVPLIFDPVTREDLHMDFKCVVHNTLSFQTLRTTVKEASSTFSWGIVLAPLSLAFLVLGGIWMHRRCKHRTGKADGLTVLWPHHQDFQSYPK

SEQ ID NO: 1584 - protein, 447 aa, Homo sapiens
MAGAGGGNDIQWCFSQVKGAVDDDVAEADIISTVEFNHSGELLATGDKGGRVVIFQQEQENKIQSHSRGEYNVYSTFQSHEPEFDYLKSLEIEEKINKIRWLPQKNAAQFLLSTNDKTIKLWKISERDKRPEGYNLKEEDGRYRDPTTVTTLRVPVFRPMDLMVEASPRRIFANAHTYHINSISINSDYETYLSADDLRINLWHLEITDRSFNIVDIKPANMEELTEVITAAEFHPNSCNTFVYSSSKGTIRLCDMRASALCDRHSKLFEEPEDPSNRSFFSEIISSISDVKFSHSGRYMMTRDYLSVKIWDLNMENRPVETYQVHEYLRSKLCSLYENDCIFDKFECCWNGSDSVVMTGSYNNFFRMFDRNTKRDITLEASRENNKPRTVLKPRKVCASGKRKKDEISVDSLDFNKKILHTAWHPKENIIAVATTNNLYIFQDKVN

SEQ ID NO: 1585 - protein, 426 aa, Homo sapiens [sequence omitted]

SEQ ID NO: 1586 - protein, 135 aa, Homo sapiens
MPVDFTGYWKMLVNENFEEYLRALDVNVALRKIANLLKPDKEIVQDGDHMIIRTLSTFRNYIMDFQVGKEFEEDLTGIDDRKCMTTVSWDGDKLQCVQKGEKEGRGWTQWIEGDELHLEMRVEGVVCKQVFKKVQ

SEQ ID NO: 1587 - protein, 972 aa, Homo sapiens
MGPGVLLLLLVATAWHGQGIPVIEPSVPELVVKPGATVTLRCVGNGSVEWDGPPSPHWTLYSDGSSSILSTNNATFQNTGTYRCTEPGDPLGGSAAIHLYVKDPARPWNVLAQEVVVFEDQDALLPCLLTDPVLEAGVSLVRVRGRPLMRHTNYSFSPWHGFTIHRAKFIQSQDYQCSALMGGRKVMSISIRLKVQKVIPGPPALTLVPAELVRIRGEAAQIVCSASSVDVNFDVFLQHNNTKLAIPQQSDFHNNRYQKVLTLNLDQVDFQHAGNYSCVASNVQGKHSTSMFFRVVESAYLNLSSEQNLIQEVTVGEGLNLKVMVEAYPGLQGFNWTYLGPFSDHQPEPKLANATTKDTYRHTFTLSLPRLKPSEAGRYSFLARNPGGWRALTFELTLRYPPEVSVIWTFINGSGTLLCAASGYPQPNVTWLQCSGHTDRCDEAQVLQVWDDPYPEVLSQEPFHKVTVQSLLTVETLEHNQTYECRAHNSVGSGSWAFIPISAGAHTHPPDEFLFTPVVVACMSIMALLLLLLLLLLYKYKQKPKYQVRWKIIESYEGNSYTFIDPTQLPYNEKWEFPRNNLQFGKTLGAGAFGKVVEATAFGLGKEDAVLKVAVKMLKSTAHADEKEALMSELKIMSHLGQHENIVNLLGACTHGGPVLVITEYCCYGDLLNFLRRKAEAMLGPSLSPGQDPEGGVDYKNIHLEKKYVRRDSGFSSQGVDTYVEMRPVSTSSNDSFSEQDLDKEDGRPLELRDLLHFSSQVAQGMAFLASKNCIHRDVAARNVLLTNGHVAKIGDFGLARDIMNDSNYIVKGNARLPVKWMAPESIFDCVYTVQSDVWSYGILLWEIFSLGLNPYPGILVNSKFYKLVKDGYQMAQPAFAPKNIYSIMQACWALEPTHRPTFQQICSFLQEQAQEDRRERDYTNLPSSSRSGGSGSSSSELEEESSSEHLTCCEQGDIAQPLLQPNNYQFC

SEQ ID NO: 1588 - protein, 172 aa, Homo sapiens
MFYHISLEHEILLHPRYFGPNLLNTVKQKLFTEVEGTCTGKYGFVIAVTTIDNIGAGVIQPGRGFVLYPVKYKAIVFRPFKGEVVDAVVTQVNKVGLFTEIGPMSCFISRHSIPSEMEFDPNSNPPCYKTMDEDIVIQQDDEIRLKIVGTRVDKNDIFAIGSLMDDYLGLVS

SEQ ID NO: 1589 - protein, 167 aa, Homo sapiens
LGAGDRRGDNPTSRLRAEDCFSSLLQGLVTEPARGATMRQKAVSLFLCYLLLFTCSGVEAGKKKCSESSDSGSGFWKALTFMAVGGGLAVAGLPALGFTGAGIAANSVAASLMSWSAILNGGGVPAGGLVATLQSLGAGGSSVVIGNIGALMGYATHKYLDSEEDEE

SEQ ID NO: 1590 - protein, 318 aa, Homo sapiens
MASPGCLLCVLGLLLCGAASLELSRPHGDTAKKPIIGILMQKCRNKVMKNYGRYYIAASYVKYLESAGARVVPVRLDLTEKDYEILFKSINGILFPGGSVDLRRSDYAKVAKIFYNLSIQSFDDGDYFPVWGTCLGFEELSLLISGECLLTATDTVDVAMPLNFTGGQLHSRMFQNFPTELLLSLAVEPLTANFHKWSLSVKNFTMNEKLKKFFNVLTTNTDGKIEFISTMEGYKYPVYGVQWHPEKAPYEWKNLDGISHAPNAVKTAFYLAEFFVNEARKNNHHFKSESEEEKALIYQFSPIYTGNISSFQQCYIFD

SEQ ID NO: 1591 - protein, 295 aa, Homo sapiens [sequence omitted]

SEQ ID NO: 1592 - protein, 782 aa, Homo sapiens
MAPHRPAPALLCALSLALCALSLPVRAATASRGASQAGAPQGRVPEARPNSMVVEHPEFLKAGKEPGLQIWRVEKFDLVPVPTNLYGDFFTGDAYVILKTVQLRNGNLQYDLHYWLGNECSQDESGAAAIFTVQLDDYLNGRAVQHREVQGFESATFLGYFKSGLKYKKGGVASGFKHVVPNEVVVQRLFQVKGRRVVRATEVPVSWESFNNGDCFILDLGNNIHQWCGSNSNRYERLKATQVSKGIRDNERSGRARVHVSEEGTEPEAMLQVLGPKPALPAGTEDTAKEDAANRKLAKLYKVSNGAGTMSVSLVADENPFAQGALKSEDCFILDHGKDGKIFVWKGKQANTEERKAALKTASDFITKMDYPKQTQVSVLPEGGETPLFKQFFKNWRDPDQTDGLGLSYLSSHIANVERVPFDAATLHTSTAMAAQHGMDDDGTGQKQIWRIEGSNKVPVDPATYGQFYGGDSYIILYNYRHGGRQGQIIYNWQGAQSTQDEVAASAILTAQLDEELGGTPVQSRVVQGKEPAHLMSLFGGKPMIIYKGGTSREGGQTAPASTRLFQVRANSAGATRAVEVLPKAGALNSNDAFVLKTPSAAYLWVGTGASEAEKTGAQELLRVLRAQPVQVAEGSEPDGFWEALGGKAAYRTSPRLKDKKMDAHPPRLFACSNKIGRFVIEEVPGELMQEDLATDDVMLLDTWDQVFVWVGKDSQEEEKTEALTSAKRYIETDPANRDRRTPITVVKQGFEPPSFVGWFLGWDDDYWSVDPLDRAMAELAA

SEQ ID NO: 1593 - protein, 557 aa, Homo sapiens
MGLSLPKEKGLILCLWSKFCRWFQDSLGNTVLHILILQPNKTFACQMYNLLLSYDRHGDHLQPLDLVPNHQGLTPFKLAGVEGNTVMFQHLMQKRKHTQWTYGPLTSTLYDLTEIDSSGDEQSLLELIITTKKREARQILDQTPVKELVSLKWKRYGRPYFCMLGAIYLLYIICFTMCCIYRPLKPRTNNRTSPRDNTLLQQKLLQEAYMTPKDDIRLVGELVTVIGAIIILLVEVPDIFRMGVTRFFGQTILGGPFHVLIITYAFMVLVTMVMRLISASGEVVPMSFALVLGWCNVMYFARGFQMLGPFTIMIQKMIFGDLMRFCWLMAVVILGFASAFYIIFQTEDPEELGHFYDYPMALFSTFELFLTIIDGPANYNVDLPFMYSITYAAFAIIATLLMLNLLIAMMGDTHWRVAHERDELWRAQIVATTVMLERKLPRCLWPRSGICGREYGLGDRWFLRVEDRQDLNRQRIQRYAQAFHTRGSEDLDKDSVEKLELGCPFSPHLSLPMPSVSRSTSRSSANWERLRQGTLRRDLRGIINRGLEDGESWEYQI

SEQ ID NO: 1594 - protein, 442 aa, Homo sapiens
MLPLLLPLLWAGALAQERRFQLEGPESLTVQEGLCVLVPCRLPTTLPASYYGYGYWFLEGADVPVATNDPDEEVQEETRGRFHLLWDPRRKNCSLSIRDARRRDNAAYFFRLKSKWMKYGYTSSKLSVRVMALTHRPNISIPGTLESGHPSNLTCSVPWVCEQGTPPIFSWMSAAPTSLGPRTTQSSVLTITPRPQDHSTNLTCQVTFPGAGVTMERTIQLNVSYAPQKVAISIFQGNSAAFKILQNTSSLPVLEGQALRLLCDADGNPPAHLSWFQGFPALNATPISNTGVLELPQVGSAEEGDFTCRAQHPLGSLQISLSLFVHWKPEGRAGGVLGAVWGASITTLVFLCVCFIFRVKTRRKKAAQPVQNTDDVNPVMVSGSRGHQHQFQTGIVSDHPAEAGPISEDEQELHYAVLHFHKVQPQEPKVTDTEYSEIKIHK

SEQ ID NO: 1595 - protein, 218 aa, Homo sapiens
MGTRDDEYDYLFKVVLIGDSGVGKSNLLSRFTRNEFNLESKSTIGVEFATRSIQVDGKTIKAQIWDTAGQERYRAITSAYYRGAVGALLVYDIAKHLTYENVERWLKELRDHADSNIVIMLVGNKSDLRHLRAVPTDEARAFAEKNNLSFIETSALDSTNVEEAFKNILTEIYRIVSQKQIADRAAHDESPGNNVVDISVPPTTDGQKPNKLQCCQNL

SEQ ID NO: 1596 - protein, 249 aa, Homo sapiens [sequence omitted]

SEQ ID NO: 1597 - protein, 134 aa, Homo sapiens
MAQSLALSLLILVLAFGIPRTQGSDGGAQDCCLKYSQRKIPAKVVRSYRKQEPSLGCSIPAILFLPRKRSQAELCADPKELWVQQLMQHLDKTPSPQKPAQGCRKDRGASKTGKKGKGSKGCKRTERSQTPKGP

SEQ ID NO: 1598 - protein, 1275 aa, Homo sapiens [sequence omitted]

SEQ ID NO: 1599 - protein, 310 aa, Homo sapiens
MDRLLRLGGGMPGLGQGPPTDAPAVDTAEQVYISSLALLKMLKHGRAGVPMEVMGLMLGEFVDDYTVRVIDVFAMPQSGTGVSVEAVDPVFQAKMLDMLKQTGRPEMVVGWYHSHPGFGCWLSGVDINTQQSFEALSERAVAVVVDPIQSVKGKVVIDAFRLINANMMVLGHEPRQTTSNLGHLNKPSIQALIHGLNRHYYSITINYRKNELEQKMLLNLHKKSWMEGLTLQDYSEHCKHNESVVKEMLELAKNYNKAVEEEDKMTPEQLAIKNVGKQDPKRHLEEHVDVLMTSNIVQCLAAMLDTVVFK

SEQ ID NO: 1600 - protein, 138 aa, Homo sapiens
KKMARTKQTARKSTGGKAPRKQLATKAARKSAPSTGGVKKPHRYRPGTVALREIRRYQKSTELLIRKLPFQRLVREIAQDFKTDLRFQSAAIGALQEASEAYLVGLFEDTNLCAIHAKRVTIMPKDIQLARRIRGERA

SEQ ID NO: 1601 - protein, 570 aa, Homo sapiens
DANSRILPSYSSAPGRTAASWLRYFYSQRPIPRPTPAMAFANLRKVLISDSLDPCCRKILQEGGLQVVEKQNLSKEELIAELQDCEGLIVRSATKVTADVINAAEKLQVVGRAGTGVDNVDLEAATRKGILVMNTPNGNSLSAAELTCGMIMCLARQIPQATASMKDGKWERKKFMGTELNGKTLGILGLGRIGREVATRMQSFGMKTIGYDPIISPEVSASFGVQQLPLEEIWPLCDFITVHTPLLPSTTGLLNDNTFAQCKKGVRVVNCARGGIVDEGALLRALQSGQCAGAALDVFTEEPPRDRALVDHENVISCPHLGASTKEAQSRCGEEIAVQFVDMVKGKSLTGVVNAQALTSAFSPHTKPWIGLAEALGTLMRAWAGSPKGTIQVITQGTSLKNAGNCLSPAVIVGLLKEASKQADVNLVNAKLLVKEAGLNVTTSHSPAAPGEQGFGECLLAVALAGAPYQAVGLVQGTTPVLQGLNGAVFRPEVPLRRDLPLLLFRTQTSDPAMLPTMIGLLAEAGVRLLSYQTSLVSDGETWHVMGISSLLPSLEAWKQHVTEAFQFHF

SEQ ID NO: 1602 - protein, 241 aa, Homo sapiens [sequence omitted]

SEQ ID NO: 1603 - protein, 255 aa, Homo sapiens
MSSIGTGYDLSASTFSPDGRVFQVEYAMKAVENSSTAIGIRCKDGVVFGVEKLVLSKLYEEGSNKRLFNVDRHVGMAVAGLLADARSLADMAREEASNFRSNFGYNIPLKHLADRVAMYVHAYTLYSAVRPFGCSFMLGSYSVNDGAQLYMIDPSGVSYGYWGCAIGKARQAAKTEIEKLQMKEMTCRDIVKEVAKIIYIVHDEVKDKAFELELSWVGELTNGRHEIVPKDIREEAEKYAKESLKEEDESDDDNM

SEQ ID NO: 1604 - protein, 130 aa, Homo sapiens [sequence omitted]

SEQ ID NO: 1605 - protein, 354 aa, Homo sapiens
MRRLMSSRDWPRTRTGTGILSSQPEENPYWWNANMVFIPYCSSDVWSGASSKSEKNEYAFMGALIIQEVVRELLGRGLSGAKVLLLAGSSAGGTGVLLNVDRVAEQLEKLGYPAIQVRGLADSGWFLDNKQYRHTDCVDTITCAPTEAIRRGIRYWNGVVPERCRRQFQEGEEWNCFFGYKVYPTLRCPVFVVQWLFDEAQLTVDNVHLTGQPVQEGLRLYIQNLGRELRHTLKDVPASFAPACLSHEIIIRSHWTDVQVKGTSLPRALHCWDRSLHDSHKASKTPLKGCPVHLVDSCPWPHCNPSCPTVRDQFTGQEMNVAQFLMHMGFDMQTVAQPQGLEPSELLGMLSNGS

SEQ ID NO: 1606 - protein, 445 aa, Homo sapiens
MAEYDLTTRIAHFLDRHLVFPLLEFLSVKEIYNEKELLQGKLDLLSDTNMVDFAMDVYKNLYSDDIPHALREKRTTVVAQLKQLQAETEPIVKMFEDPETTRQMQSTRDGRMLFDYLADKHGFRQEYLDTLYRYAKFQYECGNYSGAAEYLYFFRVLVPATDRNALSSLWGKLASEILMQNWDAAMEDLTRLKETIDNNSVSSPLQSLQQRTWLIHWSLFVFFNHPKGRDNIIDLFLYQPQYLNAIQTMCPHILRYLTTAVITNKDVRKRRQVLKDLVKVIQQESYTYKDPITEFVECLYVNFDFDGAQKKLRECESVLVNDFFLVACLEDFIENARLFIFETFCRIHQCISINMLADKLNMTPEEAERWIVNLIRNARLDAKIDSKLGHVVMGNNAVSPYQQVIEKTKSLSFRSQMLAMNIEKKLNQNSRSEAPNWATQDSGFY

SEQ ID NO: 1607 - protein, 288 aa, Homo sapiens [sequence omitted]

SEQ ID NO: 1608 - protein, 437 aa, Homo sapiens
MAAGTLYTYPENWRAFKALIAAQYSGAQVRVLSAPPHFHFGQTNRTPEFLRKFPAGKVPAFEGDDGFCVFESNAIAYYVSNEELRGSTPEAAAQVVQWVSFADSDIVPPASTWVFPTLGIMHHNKQATENAKEEVRRILGLLDAYLKTRTFLVGERVTLADITVVCTLLWLYKQVLEPSFRQAFPNTNRWFLTCINQPQFRAVLGEVKLCEKMAQFDAKKFAETQPKKDTPRKEKGSREEKQKPQAERKEEKKAAAPAPEEEMDECEQALAAEPKAKDPFAHLPKSTFVLDEFKRKYSNEDTLSVALPYFWEHFDKDGWSLWYSEYRFPEELTQTFMSCNLITGMFQRLDKLRKNAFASVILFGTNNSSSISGVWVFRGQELAFPLSPDWQVDYESYTWRKLDPGSEETQTLVREYFSWEGAFQHVGKAFNQGKIFK

SEQ ID NO: 1609 - protein, 201 aa, Homo sapiens
MANKGPSYGMSREVQSKIEKKYDEELEERLVEWIIVQCGPDVGRPDRGRLGFQVWLKNGVILSKLVNSLYPDGSKPVKVPENPPSMVFKQMEQVAQFLKAAEDYGVIKTDMFQTVDLFEGKDMAAVQRTLMALGSLAVTKNDGHYRGDPNWFMKKAQEHKREFTESQLQEGKHVIGLQMGSNRGASQAGMTGYGRPRQIIS

SEQ ID NO: 1610 - protein, 2335 aa, Homo sapiens [sequence omitted]

SEQ ID NO: 1611 - protein, 609 aa, Homo sapiens
MSGWESYYKTEGDEEAEEEQEENLEASGDYKYSGRDSLIFLVDASKAMFESQSEDELTPFDMSIQCIQSVYISKIISSDRDLLAVVFYGTEKDKNSVNFKNIYVLQELDNPGAKRILELDQFKGQQGQKRFQDMMGHGSDYSLSEVLWVCANLFSDVQFKMSHKRIMLFTNEDNPHGNDSAKASRARTKAGDLRDTGIFLDLMHLKKPGGFDISLFYRDIISIAEDEDLRVHFEESSKLEDLLRKVRAKETRKRALSRLKLKLNKDIVISVGIYNLVQKALKPPPIKLYRETNEPVKTKTRTFNTSTGGLLLPSDTKRSQIYGSRQIILEKEETEELKRFDDPGLMLMGFKPLVLLKKHHYLRPSLFVYPEESLVIGSSTLFSALLIKCLEKEVAALCRYTPRRNIPPYFVALVPQEEELDDQKIQVTPPGFQLVFLPFADDKRKMPFTEKIMATPEQVGKMKAIVEKLRFTYRSDSFENPVLQQHFRNLEALALDLMEPEQAVDLTLPKVEAMNKRLGSLVDEFKELVYPPDYNPEGKVTKRKHDNEGSGSKRPKVEYSEEELKTHISKGTLGKFTVPMLKEACRAYGLKSGLKKQELLEALTKHFQD

SEQ ID NO: 1612 - protein, 510 aa, Homo sapiens
KQWCAERRGLGMSLADELLADLEEAAEEEEGGSYGEEEEEPAIEDVQEETQLDLSGDSVKTIAKLWDSKMFAEIMMKIEEYISKQAKASEVMGPVEAAPEYRVIVDANNLTVEIENELNIIHKFIRDKYSKRFPELESLVPNALDYIRTVKELGNSLDKCKNNENLQQILTNATIMVVSVTASTTQGQQLSEEELERLDEACDMALELNASKHRIYEYVESRMSFIAPNLSIIIGASTAAKIMGVAGGLTNLSKMPACNIMLLGAQRKTLSGFSSTSVLPHTGYIYHSDIVQSLPPDLRRKAARLVAAKCTLAARVDSFHESTEGKVGYELKDEIERKFDKWQEPPPVKQVKPLPAPLDGQRKKRGGRRYRKMKERLGLTEIRKQANRMSFGEIEEDAYQEDLGFSLGHLGKSGSGRVRQTQVNEATKARISKTLQRTLQKQSVVYGGKSTIRDRSSGTASSVAFTPLQGLEIVNPQAAEKKVAEANQKYFSSMAEFLKVKGEKSGLMST

SEQ ID NO: 1613 - protein, 81 aa, Homo sapiens [sequence omitted]

SEQ ID NO: 1614 - protein, 348 aa, Homo sapiens
MAEKVLVTGGAGYIGSHTVLELLEAGYLPVVIDNFHNAFRGGGSLPESLRRVQELTGRSVEFEEMDILDQGALQRLFKKYSFMAVIHFAGLKAVGESVQKPLDYYRVNLTGTIQLLEIMKAHGVKNLVFSSSATVYGNPQYLPLDEAHPTGGCTNPYGKSKFFIEEMIRDLCQADKTWNVVLLRYFNPTGAHASGCIGEDPQGIPNNLMPYVSQVAIGRREALNVFGNDYDTEDGTGVRDYIHVVDLAKGHIAALRKLKEQCGCRIYNLGTGTGYSVLQMVQAMEKASGKKIPYKVVARREGDVAACYANPSLAQEELGWTAALGLDRMCEDLWRWQKQNPSGFGTQA

SEQ ID NO: 1615 - protein, 175 aa, Homo sapiens
MAAVSMSVVLRQTLWRRRAVAVAALSVSRVPTRSLRTSTWRLAQDQTQDTQLITVDEKLDITTLTGVPEEHIKTRKVRIFVPARNNMQSGVNNTKKWKMEFDTRERWENPLMGWASTADPLSNMVLTFSTKEDAVSFAEKNGWSYDIEERKVPKPKSKSYGANFSWNKRTRVSTK

SEQ ID NO: 1616 - protein, 136 aa, Homo sapiens
MQTAGALFISPALIRCCTRGLIRPVSASFLNSPVNSSKQPSYSNFPLQVARREFQTSVVSRDIDTAAKFIGAGAATVGVAGSGAGIGTVFGSLIIGYARNPSLKQQLFSYAILGFALSEAMGLFCLMVAFLILFAM

SEQ ID NO: 1617 - protein, 288 aa, Homo sapiens
MSSRKQGSQPRGQQSAEEENFKKPTRSNMQRSKMRGASSGKKTAGPQQKNLEPALPGRWGGRSAENPPSGSVRKTRKNKQKTPGNGDGGSTSEAPQPPRKKRARADPTVESEEAFKNRMEVKVKIPEELKPWLVEDWDLVTRQKQLFQLPAKKNVDAILEEYANCKKSQGNVDNKEYAVNEVVAGIKEYFNVMLGTQLLYKFERPQYAEILLAHPDAPMSQVYGAPHLLRLFVRIGAMLAYTPLDEKSLALLLGYLHDFLKYLAKNSASLFTASDYKVASAEYHRKAL

SEQ ID NO: 1618 - protein, 354 aa, Homo sapiens
MRLAVLFSGALLGLLAAQGTGNDCPHKKSATLLPSFTVTPTVTESTGTTSHRTTKSHKTTTHRTTTTGTTSHGPTTATHNPTTTSHGNVTVHPTSNSTATSQGPSTATHSPATTSHGNATVHPTSNSTATSPGFTSSAHPEPPPPSPSPSPTSKETIGDYTWTNGSQPCVHLQAQIQIRVMYTTQGGGEAWGISVLNPNKTKVQGSCEGAHPHLLLSFPYGHLSFGFMQDLQQKVVYLSYMAVEYNVSFPHAAKWTFSAQNASLRDLQAPLGQSFSCSNSSIILSPAVHLDLLSLRLQAAQLPHTGVFGQSFSCPSDRSILLPLIIGLILLGLLALVLIAFCIIRRRPSAYQAL

SEQ ID NO: 1619 - protein, 763 aa, Homo sapiens
MAATGTAAAAATGRLLLLLLVGLTAPALALAGYIEALAANAGTGFAVAEPQIAMFCGKLNMHVNIQTGKWEPDPTGTKSCFETKEEVLQYCQEMYPELQITNVMEANQRVSIDNWCRRDKKQCKSRFVTPFKCLVGEFVSDVLLVPEKCQFFHKERMEVCENHQHWHTVVKEACLTQGMTLYSYGMLLPCGVDQFHGTEYVCCPQTKIIGSVSKEEEEEDEEEEEEEDEEEDYDVYKSEFPTEADLEDFTEAAVDEDDEDEEEGEEVVEDRDYYYDTFKGDDYNEENPTEPGSDGTMSDKEITHDVKAVCSQEAMTGPCRAVMPRWYFDLSKGKCVRFIYGGCGGNRNNFESEDYCMAVCKAMIPPTPLPTNDVDVYFETSADDNEHARFQKAKEQLEIRHRNRMDRVKKEWEEAELQAKNLPKAERQTLIQHFQAMVKALEKEAASEKQQLVETHLARVEAMLNDRRRMALENYLAALQSDPPRPHRILQALRRYVRAENKDRLHTIRHYQHVLAVDPEKAAQMKSQVMTHLHVIEERRNQSLSLLYKVPYVAQEIQEEIDELLQEQRADMDQFTASISETPVDVRVSSEESEEIPPFHPFHPFPALPENEDTQPELYHPMKKGSGVGEQDGGLIGAEEKVINSKNKVDENMVIDETLDVKEMIFNAERVGGLEEERESVGPLREDFSLSSSALIGLLVIAVAIATVIVISLVMLRKRQYGTISHGIVEVDPMLTPEERHLNKMQNHGYENPTYKYLEQMQI

SEQ ID NO: 1620 - protein, 248 aa, Homo sapiens [sequence omitted]

SEQ ID NO: 1621 - protein, 162 aa, Homo sapiens [sequence omitted]

SEQ ID NO: 1622 - protein, 1338 aa, Homo sapiens
MVSYWDTGVLLCALLSCLLLTGSSSGSKLKDPELSLKGTQHIMQAGQTLHLQCRGEAAHKWSLPEMVSKESERLSITKSACGRNGKQFCSTLTLNTAQANHTGFYSCKYLAVPTSKKKETESAIYIFISDTGRPFVEMYSEIPEIIHMTEGRELVIPCRVTSPNITVTLKKFPLDTLIPDGKRIIWDSRKGFIISNATYKEIGLLTCEATVNGHLYKTNYLTHRQTNTIIDVQISTPRPVKLLRGHTLVLNCTATTPLNTRVQMTWSYPDEKNKRASVRRRIDQSNSHANIFYSVLTIDKMQNKDKGLYTCRVRSGPSFKSVNTSVHIYDKAFITVKHRKQQVLETVAGKRSYRLSMKVKAFPSPEVVWLKDGLPATEKSARYLTRGYSLIIKDVTEEDAGNYTILLSIKQSNVFKNLTATLIVNVKPQIYEKAVSSFPDPALYPLGSRQILTCTAYGIPQPTIKWFWHPCNHNHSEARCDFCSNNEESFILDADSNMGNRIESITQRMAIIEGKNKMASTLVVADSRISGIYICIASNKVGTVGRNISFYITDVPNGFHVNLEKMPTEGEDLKLSCTVNKFLYRDVTWILLRTVNNRTMHYSISKQKMAITKEHSITLNLTIMNVSLQDSGTYACRARNVYTGEEILQKKEITIRDQEAPYLLRNLSDHTVAISSSTTLDCHANGVPEPQITWFKNNHKIQQEPGIILGPGSSTLFIERVTEEDEGVYHCKATNQKGSVESSAYLTVQGTSDKSNLELITLTCTCVAATLFWLLLTLFIRKMKRSSSEIKTDYLSIIMDPDEVPLDEQCERLPYDASKWEFARERLKLGKSLGRGAFGKVVQASAFGIKKSPTCRTVAVKMLKEGATASEYKALMTELKILTHIGHHLNVVNLLGACTKQGGPLMVIVEYCKYGNLSNYLKSKRDLFFLNKDAALHMEPKKEKMEPGLEQGKKPRLDSVTSSESFASSGFQEDKSLSDVEEEEDSDGFYKEPITMEDLISYSFQVARGMEFLSSRKCIHRDLAARNILLSENNVVKICDFGLARDIYKNPDYVRKGDTRLPLKWMAPESIFDKIYSTKSDVWSYGVLLWEIFSLGGSPYPGVQMDEDFCSRLREGMRMRAPEYSTPEIYQIMLDCWHRDPKERPRFAELVEKLGDLLQANVQQDGKDYIPINAILTGNSGFTYSTPAFSEDFFKESISAPKFNSGSSDDVRYVNAFKFMSLERIKTFEELLPNATSMFDDYQGDSSTLLASPMLKRFTWTDSKPKASLKIDLRVTSKSKESGLSDVSRPSFCHSSCGHVSEGKRRFTYDHAELERKIACCSPPPDYNSVVLYSTPPI

SEQ ID NO: 1623 - protein, 365 aa, Homo sapiens
  misc_feature (1)...(365): Xaa = any amino acid or nothing
IIILKRHLITAQFRIAKIWNQPTCPSTDEWIKKGEYRNIDXDNXNTLKVPYNVGFGKDFLDMTPKAQTTKVKTDKLDYFKTKNFYTSKNTINKVKKXPXEXEKIFANHISDRGLISRIXKELLQVNNNDNSNNPIFKIAKDLNRHFSKDNIQMTSKHMKRCSASLLIREMQIKTTMKCHLTPTMMAAIIKKAENNKCWGGCGNLGTLVHSWXERKMVQLLXKTTWFLNKLKIEISXDLVIPLLAIYSKELKVGSQKDVCTLQHYTCKYNNIDIMYIAPLFTIAKTQPKCPLMDEWIKKRYKIRILFGSFKKEEILTYATTXTHLEDTVLREISQSQTDKYFMIXLISAHCNLLLLGSSDPRASAS

SEQ ID NO: 1624 - protein, 574 aa, Homo sapiens
MGNNFSSIPSLPRGNPSRAPRGHPQNLKDSIGGPFPVTSHRCHHKQKHCPAVLPSGGLPATPLLFHPHTKGSQILMDLSHKAVKRQASFCNAITFSNRPVLIYEQVRLKITKKQCCWSGALRLGFTSKDPSRIHPDSLPKYACPDLVSQSGFWAKALPEEFANEGNIIAFWVDKKGRVFHRINDSAVMLFFSGVRTADPLWALVDVYGLTRGVQLLDSELVLPDCLRPRSFTALRRPSLRREADDARLSVSLCDLNVPGADGDEAAPAAGCPIPQNSLNSQHSRALPAQLDGDLRFHALRAGAHVRILDEQTVARVEHGRDERALVFTSRPVRVAETIFVKVTRSGGARPGALSFGVTTCDPGTLRPADLPFSPEALVDRKEFWAVCRVPGPLHSGDILGLVVNADGELHLSHNGAAAGMQLCVDASQPLWMLFGLHGTITQIRILGSTILAERGIPSLPCSPASTPTSPSALGSRLSDPLLSTCSSGPLGSSAGGTAPNSPVSLPESPVTPGLGQWSDECTICYEHAVDTVIYTCGHMCLCYACGLRLKKALHACCPICRRPIKDIIKTYRSS

SEQ ID NO: 1625 - protein, 116 aa, Homo sapiens
MDYYRKYAAIFLVTLSVFLHVLHSAPDVQDCPECTLQENPFFSQPGAPILQCMGCCFSRAYPTPLRSKKTMLVQKNVTSESTCCVAKSYNRVTVMGGFKVENHTACHCSTCYYHKS

SEQ ID NO: 1626 - protein, 394 aa, Homo sapiens
MGCLGNSKTEDQRNEEKAQREANKKIEKQLQKDKQVYRATHRLLLLGAGESGKSTIVKQMRILHVNGFNGEGGEEDPQAARSNSDGEKATKVQDIKNNLKEAIETIVAAMSNLVPPVELANPENQFRVDYILSVMNVPDFDFPPEFYEHAKALWEDEGVRACYERSNEYQLIDCAQYFLDKIDVIKQADYVPSDQDLLRCRVLTSGIFETKFQVDKVNFHMFDVGGQRDERRKWIQCFNDVTAIIFVVASSSYNMVIREDNQTNRLQEALNLFKSIWNNRWLRTISVILFLNKQDLLAEKVLAGKSKIEDYFPEFARYTTPEDATPEPGEDPRVTRAKYFIRDEFLRISTASGDGRHYCYPHFTCAVDTENIRRVFNDCRDIIQRMHLRQYELL

SEQ ID NO: 1627 - protein, 320 aa, Homo sapiens
MSKSESPKEPEQLRKLFIGGLSFETTDESLRSHFEQWGTLTDCVVMRDPNTKRSRGFGFVTYATVEEVDAAMNARPHKVDGRVVEPKRAVSREDSQRPGAHLTVKKIFVGGIKEDTEEHHLRDYFEQYGKIEVIEIMTDRGSGKKRGFAFVTFDDHDSVDKIVIQKYHTVNGHNCEVRKALSKQEMASASSSQRGRSGSGNFGGGRGGGFGGNDNFGRGGNFSGRGGFGGSRGGGGYGGSGDGYNGFGNDGSNFGGGGSYNDFGNYNNQSSNFGPMKGGNFGGRSSGPYGGGGQYFAKPRNQGGYGGSSSSSSYGSGRRF

SEQ ID NO: 1628 - protein, 341 aa, Homo sapiens
MLGAEWSKLQPTEKQRYLDEAEREKQQYMKELRAYQQSEAYKMCTEKIQEKKIKKEDSSSGLMNTLLNGHKGGDCDGFSTFDVPIFTEEFLDQNKAREAELRRLRKMNVAFEEQNAVLQRQNAEHEQRARASGAGAGAGGAEDAGAAAAAPGRAPGAHRQLRLTAGAGHGRNAHAGHSGLLHGPASRSHRARPRPAREAHRPHQGNPGPGRQRAPVRSGRAHDAEEKLWARPCHTPPRGREAGGPPFGAWSHPAPLGAPAPLKLNFCSIPLAFNLPSPLNPEKALAARYTQKNLTAEGAPPRRTATRYTGSPGHPQDTGQTKPTPSTRQDPPNYSLRGAVP

SEQ ID NO: 1629 - protein, 266 aa, Homo sapiens [sequence omitted]

SEQ ID NO: 1630 - protein, 133 aa, Homo sapiens [sequence omitted]

SEQ ID NO: 1631 - protein, 524 aa, Homo sapiens
MYALFLLASLLGAALAGPVLGLKECTRGSAVWCQNVKTASDCGAVKHCLQTVWNKPTVKSLPCDICKDVVTAAGDMLKDNATEEEILVYLEKTCDWLPKPNMSASCKEIVDSYLPVILDIIKGEMSRPGEVCSALNLCESLQKHLAELNHQKQLESNKIPELDMTEVVAPFMANIPLLLYPQDGPRSKPQPKDNGDVCQDCIQMVTDIQTAVRTNSTFVQALVEHVKEECDRLGPGMADICKNYISQYSEIAIQMMMHMQPKEICALVGFCDEVKEMPMQTLVPAKVASKNVIPALELVEPIKKHEVPAKSDVYCEVCEFLVKEVTKLIDNNKTEKEILDAFDKMCSKLPKSLSEECQEVVDTYGSSILSILLEEVSPELVCSMLHLCSGTRLPALTVHVTQPKDGGFCEVCKKLVGYLDRNLEKNSTKQEILAALEKGCSFLPDPYQKQCDQFVAEYEPVLIEILVEVMDPSFVCLKIGACPSAHKPLLGTEKCIWGPSYWCQNTETAAQCNAVEHCKRHVWN

SEQ ID NO: 1632 - protein, 284 aa, Homo sapiens
MDAIKKKMQMLKLDKENAIDRAEQAEADKKQAEDRCKQLEEEQQALQKKLKGTEDEVEKYSESVKEAQEKLEQAEKKATDAEADVASLNRRIQLVEEELDRAQERLATALQKLEEAEKAADESERGMKVIENRAMKDEEKMELQEMQLKEAKHIAEDSDRKYEEVARKLVILEGELERSEERAEVAESRARQLEEELRTMDQALKSLMASEEEYSTKEDKYEEEIKLLEEKLKEAETRAEFAERSVAKLEKTIDDLEETLASAKEENVEIHQTLDQTLLELNNL

SEQ ID NO: 1633 - protein, 227 aa, Homo sapiens
MNIKGSPWKGSLLLLLVSNLLLCQSVAPLPICPGGAARCQVTLRDLFDRAVVLSHYIHNLSSEMFSEFDKRYTHGRGFITKAINSCHTSSLATPEDKEQAQQMNQKDFLSLIVSILRSWNEPLYHLVTEVRGMQEAPEAILSKAVEIEEQTKRLLEGMELIVSQVHPETKENEIYPVWSGLPSLQMADEESRLSAYYNLLHCLRRDSHKIDNYLKLLKCRIIHNNNC

SEQ ID NO: 1634 - protein, 108 aa, Homo sapiens
RQEFGTRESPRAWGSSGTCGPGEPERGGSRGGASEAEEQAVEARQEEEQDLDGEKGPSSEGPEEEDGEGFSFKYSPGKLRGNQYKKMMTKEELEEEQRIELTSDLTSL

SEQ ID NO: 1635 - protein, 1897 aa, Homo sapiens
MVPLVPALVMLGLVAGAHGDSKPVFIKVPEDQTGLSGGVASFVCQATGEPKPRITWMKKGKKVSSQRFEVIEFDDGAGSVLRIQPLRVQRDEAIYECTATNSLGEINTSAKLSVLEEEQLPPGFPSIDMGPQLKVVEKARTATMLCAAGGNPDPEISWFKDFLPVDPATSNGRIKQLRSGALQIESSEESDQGKYECVATNSAGTRYSAPANLYVRVRRVAPRFSIPPSSQEVMPGGSVNLTCVAVGAPMPYVKWMMGAEELTKEDEMPVGRNVLELSNVVRSANYTCVAISSLGMIEATAQVTVKALPKPPIDLVVTETTATSVTLTWDSGNSEPVTYYGIQYRAAGTEGPFQEVDGVATTRYSIGGLSPFSEYAFRVLAVNSIGRGPPSEAVRARTGEQAPSSPPRRVQARMLSASTMLVQWEPPEEPNGLVRGYRVYYTPDSRRPPNAWHKHNTDAGLLTTVGSLLPGITYSLRVLAFTAVGDGPPSPTIQVKTQQGVPAQPADFQAEVESDTRIQLSWLLPPQERIIMYELVYWAAEDEDQQHKVTFDPTSSYTLEDLKPDTLYRFQLAARSDMGVGVFTPTIEARTAQSTPSAPPQKVMCVSMGSTTVRVSWVPPPADSRNGVITQYSVAHEAVDGEDRGRHVVDGISREHSSWDLVGLEKWTEYRVWVRAHTDVGPGPESSPVLVRTDEDVPSGPPRKVEVEPLNSTAVHVYWKLPVPSKQHGQIRGYQVTYVRLENGEPRGLPIIQDVMLAEAQWRPEESEDYETTISGLTPETTYSVTVAAYTTKGDGARSKPKIVTTTGAVPGRPTMMISTTAMNTALLQWHPPKELPGELLGYRLQYCRADEARPNTIDFGKDDQHFTVTGLHKGTTYIFRLAAKNRAGLGEEFEKEIRTPEDLPSGFPQNLHVTGLTTSTTELAWDPPVLAERNGRIISYTVVFRDINSQQELQNITTDTRFTLTGLKPDTTYDIKVRAWTSKGSGPLSPSIQSRTMPVEQVFAKNFRVAAAMKTSVLLSWEVPDSYKSAVPFKILYNGQSVEVDGHSMRKLIADLQPNTEYSFVLMNRGSSAGGLQHLVSIRTAPDLLPHKPLPASAYIEDGRFDLSMPHVQDPSLVRWFYIVVVPIDRVGGSMLTPRWSTPEELELDELLEAIEQGGEEQRRRRRQAERLKPYVAAQLDVLPETFTLGDKKNYRGFYNRPLSPDLSYQCFVLASLKEPMDQKRYASSPYSDEIVVQVTPAQQQEEPEMLWVTGPVLAVILIILIVIAILLFKRKRTHSPSSKDEQSIGLKDSLLAHSSDPVEMRRLNYQTPGMRDHPPIPITDLADNIERLKANDGLKFSQEYESIDPGQQFTWENSNLEVNKPKNRYANVIAYDHSRVILTSIDGVPGSDYINANYIDGYRKQNAYIATQGPLPETMGDFWRMVWEQRTATVVMMTRLEEKSRVKCDQYWPARGTETCGLIQVTLLDTVELATYTVRTFALHKSGSSEKRELRQFQFMAWPDHGVPEYPTPILAFLRRVKACNPLDAGPMVVHCSAGVGRTGCFIVIDAMLERMKHEKTVDIYGHVTCMRSQRNYMVQTEDQYVFIHEALLEAATCGHTEVPARNLYAHIQKLGQVPPGESVTAMELEFKLLASSKAHTSRFISANLPCNKFKNRLVNIMPYELTRVCLQPIRGVEGSDYINASFLDGYRQQKAYIATQGPLAESTEDFWRMLWEHNSTIIVMLTKLREMGREKCHQYWPAERSARYQYFVVDPMAEYNMPQYILREFKVTDARDGQSRTIRQFQFTDWPEQGVPKTGEGFIDFIGQVHKTKEQFGQDGPITVHCSAGVGRTGVFITLSIVLERMRYEGVVDMFQTVKTLRTQRPAMVQTEDQYQLCYRAALEYLGSFDHYAT

SEQ ID NO: 1636 - protein, 553 aa, Homo sapiens
MLSVRVAAAVVRALPRRAGLVSRNALGSSFIAARNFHASNTHLQKTGTAEMSSILEERILGADTSVDLEETGRVLSIGDGIARVHGLRNVQAEEMVEFSSGLKGMSLNLEPDNVGVVVFGNDKLIKEGDIVKRTGAIVDVPVGEELLGRVVDALGNAIDGKGPIGSKTRRRVGLKAPGIIPRISVREPMQTGIKAVDSLVPIGRGQRELIIGDRQTGKTSIAIDTIINQKRFNDGSDEKKKLYCIYVAIGQKRSTVAQLVKRLTDADAMKYTIVVSATASDAAPLQYLAPYSGCSMGEYFRDNGKHALIIYDDLSKQAVAYRQMSLLLRRPPGREAYPGDVFYLHSRLLERAAKMNDAFGGGSLTALPVIETQAGDVSAYIPTNVISITDGQIFLETELFYKGIRPAINVGLSVSRVGSAAQTRAMKQVAGTMKLELAQYREVAAFAQFGSDLDAATQQLLSRGVRLTELLKQGQYSPMAIEEQVAVIYAGVRGYLDKLEPSKITKFENAFLSHVVSQHQALLGTIRADGKISEQSDAKLKEIVTNFLAGFEA

SEQ ID NO: 1637 - protein, 114 aa, Homo sapiens
MTCKMSQLERNIETIINTFHQYSVKLGHPDTLNQGEFKELVRKDLQNFLKKENKNEKVIEHIMEDLDTNADKQLSFEEFIMLMARLTWASHEKMHEGDEGPGHHHKPGLGEGTP

SEQ ID NO: 1638 - protein, 122 aa, Homo sapiens
MEASALTSSAVTSVAKVVRVASGSAVVLPLARIATVVIGGVVAMAAVPMVLSAMGFTAAGIASSSIAAKMMSAAAIANGGGVASGSLVGTLQSLGATGLSGLTKFILGSIGSAIAAVIARFY

SEQ ID NO: 1639 - protein, 417 aa, Homo sapiens
MSLSNKLTLDKLDVKGKRVVMRVDFNVPMKNNQITNNQRIKAAVPSIKFCLDNGAKSVVLMSHLGRPDGVPMPDKYSLEPVAVELKSLLGKDVLFLKDCVGPEVEKACANPAAGSVILLENLRFHVEEEGKGKDASGNKVKAEPAKIEAFRASLSKLGDVYVNDAFGTAHRAHSSMVGVNLPQKAGGFLMKKELNYFAKALESPERPFLAILGGAKVADKIQLINNMLDKVNEMIIGGGMAFTFLKVLNNMEIGTSLFDEEGAKIVKDLMSKAEKNGVKITLPVDFVTADKFDENAKTGQATVASGIPAGWMGLDCGPESSKKYAEAVTRAKQIVWNGPVGVFEWEAFARGTKALMDEVVKATSRGCITIIGGGDTATCCAKWNTEDKVSHVSTGGGASLELLEGKVLPGVDALSNI

SEQ ID NO: 1640 - protein, 2080 aa, Homo sapiens
MLRVFILYAENVHTPDTDISDAYCSAVFAGVKKRTKVIKNSVNPVWNEGFEWDLKGIPLDQGSELHVVVKDHETMGRNRFLGEAKVPLREVLATPSLSASFNAPLLDTKKQPTGASLVLQVSYTPLPGAVPLFPPPTPLEPSPTLPDLDVVADTGGEEDTEDQGLTGDEAEPFLDQSGGPGAPTTPRKLPSRPPPHYPGIKRKRSAPTSRKLLSDKPQDFQIRVQVIEGRQLPGVNIKPVVKVTAAGQTKRTRIHKGNSPLFNETLFFNLFDSPGELFDEPIFITVVDSRSLRTDALLGEFRMDVGTIYREPRHAYLRKWLLLSDPDDFSAGARGYLKTSLCVLGPGDEAPLERKDPSEDKEDIESNLLRPTGVALRGAHFCLKVFRAEDLPQMDDAVMDNVKQIFGFESNKKNLVDPFVEVSFAGKMLCSKILEKTANPQWNQNITLPAMFPSMCEKMRIRIIDWDRLTHNDIVATTYLSMSKISAPGGEIEEEPAGAVKPSKASDLDDYLGFLPTFGPCYINLYGSPREFTGFPDPYTELNTGKGEGVAYRGRLLLSLETKLVEHSEQKVEDLPADDILRVEKYLRRRKYSLFAAFYSATMLQDVDDAIQFEVSIGNYGNKFDMTCLPLASTTQYSRAVFDGCHYYYLPWGNVKPVVVLSSYWEDISHRIETQNQLLGIADRLEAGLEQVHLALKAQCSTEDVDSLVAQLTDELIAGCSQPLGDIHETPSATHLDQYLYQLRTHHLSQITEAALALKLGHSELPAALEQAEDWLLRLRALAEEPQNSLPDIVIWMLQGDKRVAYQRVPAHQVLFSRRGANYCGKNCGKLQTIFLKYPMEKVPGARMPVQIRVKLWFGLSVDEKEFNQFAEGKLSVFAETYENETKLALVGNWGTTGLTYPKFSDVTGKIKLPKDSFRPSAGWTWAGDWFVCPEKTLLHDMDAGHLSFVEEVFENQTRLPGGQWIYMSDNYTDVNGEKVLPKDDIECPLGWKWEDEEWSTDLNRAVDEQGWEYSITIPPERKPKHWVPAEKMYYTHRRRRWVRLRRRDLSQMEALKRHRQAEAEGEGWEYASLFGWKFHLEYRKTDAFRRRRWRRRMEPLEKTGPAAVFALEGALGGVMDDKSEDSMSVSTLSFGVNRPTISCIFDYGNRYHLRCYMYQARDLAAMDKDSFSDPYAIVSFLHQSQKTVVVKNTLNPTWDQTLIFYEIEIFGEPATVAEQPPSIVVELYDHDTYGADEFMGRCICQPSLERMPRLAWFPLTRGSQPSGELLASFELIQREKPAIHHIPGFEVQETSRILDESEDTDLPYPPPQREANIYMVPQNIKPALQRTAIEILAWGLRNMKSYQLANISSPSLVVECGGQTVQSCVIRNLRKNPNFDICTLFMEVMLPREELYCPPITVKVIDNRQFGRRPVVGQCTIRSLESFLCDPYSAESPSPQGGPDDVSLLSPGEDVLIDIDDKEPLIPIQEEEFIDWWSKFFASIGEREKCGSYLEKDFDTLKVYDTQLENVEAFEGLSDFCNTFKLYRGKTQEETEDPSVIGEFKGLFKIYPLPEDPAIPMPPRQFHQLAAQGPQECLVRIYIVRAFGLQPKDPNGKCDPYIKISIGKKSVSDQDNYIPCTLEPVFGKMFELTCTLPLEKDLKITLYDYDLLSKDEKIGETVVDLENRLLSKFGARCGLPQTYCVSGPNQWRDQLRPSQLLHLFCQQHRVKAPVYRTDRVMFQDKEYSIEEIEAGRIPNPHLGPVEERLALHVLQQQGLVPEHVESRPLYSPLQPDIEQGKLQMWVDLFPKALGRPGPPFNITPRRARRFFLRCIIWNTRDVILDDLSLTGEKMSDIYVKGWMIGFEEHKQKTDVHYRSLGGEGNFNWRFIFPFDYLPAEQVCTIAKKDAFWRLDKTESKIPARVVFQIWDNDKFSFDDFLGSLQLDLNRMPKPAKTAKKCSLDQLDDAFHPEWFVSLFEQKTVKGWWPCVAEEGEKKILAGKLEMTLEIVAESEHEERPAGQGRDEPNMNPKLEDPRRPDTSFLWFTSPYKTMKFILWRRFRWAIILFIILFILLLFLAIFIYAFPNYAAMKLVKPFS

SEQ ID NO: 1641 - protein, 1970 aa, Homo sapiens
MHGGGPPSGDSACPLRTIKRVQFGVLSPDELKRMSVTEGGIKYPETTEGGRPKLGGLMDPRQGVIERTGRCQTCAGNMTECPGHFGHIELAKPVFHVGFLVKTMKVLRCVCFFCSKLLVDSNNPKIKDILAKSKGQPKKRLTHVYDLCKGKNICEGGEEMDNKFGVEQPEGDEDLTKEKGHGGCGRYQPRIRRSGLELYAEWKHVNEDSQEKKILLSPERVHEIFKRISDEECFVLGMEPRYARPEWMIVTVLPVPPLSVRPAVVMQGSARNQDDLTHKLADIVKINNQLRRNEQNGAAAHVIAEDVKLLQFHVATMVDNELPGLPRAMQKSGRPLKSLKQRLKGKEGRVRGNLMGKRVDFSARTVITPDPNLSIDQVGVPRSIAANMTFAEIVTPFNIDRLQELVRRGNSQYPGAKYIIRDNGDRIDLRFHPKPSDLHLQTGYKVERHMCDGDIVIFNRQPTLHKMSMMGHRVRILPWSTFRLNLSVTTPYNADFDGDEMNLHLPQSLETRAEIQELAMVPRMIVTPQSNRPVMGIVQDTLTAVRKFTKRDVFLERGEVMNLLMFLSTWDGKVPQPAILKPRPLWTGKQIFSLIIPGHINCIRTHSTHPDDEDSGPYKHISPGDTKVVVENGELIMGILCKKSLGTSAGSLVHISYLEMGHDITRLFYSNIQTVINNWLLIEGHTIGIGDSIADSKTYQDIQNTIKKAKQDVIEVIEKAHNNELEPTPGNTLRQTFENQVNRILNDARDKTGSSAQKSLSEYNNFKSMVVSGAKGSKINISQVIAVVGQQNVEGKRIPFGFKHRTLPHFIKDDYGPESRGFVENSYLAGLTPTEFFFHAMGGREGLIDTAVKTAETGYIQRRLIKSMESVMVKYDATVRNSINQVVQLRYGEDGLAGESVEFQNLATLKPSNKAFEKKFRFDYTNERALRRTLQEDLVKDVLSNAHIQNELEREFERMREDREVLRVIFPTGDSKVVLPCNLLRMIWNAQKIFHINPRLPSDLHPIKVVEGVKELSKKLVIVNGDDPLSRQAQENATLLFNIHLRSTLCSRRMAEEFRLSGEAFDWLLGEIESKFNQAIAHPGEMVGALAAQSLGEPATQMTLNTFHYAGVSAKNVTLGVPRLKELINISKKPKTPSLTVFLLGQSARDAERAKDILCRLEHTTLRKVTANTAIYYDPNPQSTVVAEDQEWVNVYYEMPDFDVARISPWLLRVELDRKHMTDRKLTMEQIAEKINAGFGDDLNCIFNDDNAEKLVLRIRIMNSDENKMQEEEEVVDKMDDDVFLRCIESNMLTDMTLQGIEQISKVYMHLPQTDNKKKIIITEDGEFKALQEWILETDGVSLMRVLSEKDVDPVRTTSNDIVEIFTVLGIEAVRKALERELYHVISFDGSYVNYRHLALLCDTMTCRGHLMAITRHGVNRQDTGPLMKCSFEETVDVLMEAAAHGESDPMKGVSENIMLGQLAPAGTGCFDLLLDAEKCKYGMEIPTNIPGLGAAGPTGMFFGSAPSPMGGISPAMTPWNQGATPAYGAWSPSVGSGMTPGAAGFSPSAASDASGFSPGYSPAWSPTPGSPGSPGPSSPYIPSPGGAMSPSYSPTSPAYEPRSPGGYTPQSPSYSPTSPSYSPTSPSYSPTSPNYSPTSPSYSPTSPSYSPTSPSYSPTSPSYSPTSPSYSPTSPSYSPTSPSYSPTSPSYSPTSPSYSPTSPSYSPTSPSYSPTSPSYSPTSPSYSPTSPSYSPTSPSYSPTSPNYSPTSPNYTPTSPSYSPTSPSYSPTSPNYTPTSPNYSPTSPSYSPTSPSYSPTSPSYSPSSPRYTPQSPTYTPSSPSYSPSSPSYSPTSPKYTPTSPSYSPSSPEYTPTSPKYSPTSPKYSPTSPKYSPTSPTYSPTTPKYSPTSPTYSPTSPVYTPTSPKYSPTSPTYSPTSPKYSPTSPTYSPTSPKGSTYSPTSPGYSPTSPTYSLTSPAISPDDSDEEN

SEQ ID NO: 1642 - protein, 161 aa, Homo sapiens
MAGRKLALKTIDWVAFAEIIPQNQKAIASSLKSWNETLTSRLAALPENPPAIDWAYYKANVAKAGLVDDFEKKFNALKVPVPEDKYTAQVDAEEKEDVKSCAEWVSLSKARIVEYEKEMEKMKNLIPFDQMTIEDLNEAFPETKLDKKKYPYWPHQPIENL

SEQ ID NO: 1643 - protein, 803 aa, Homo sapiens
MRALWVLGLCCVLLTFGSVRADDEVDVDGTVEEDLGKSREGSRTDDEVVQREEEAIQLDGLNASQIRELREKSEKFAFQAEVNRMMKLIINSLYKNKEIFLRELISNASDALDKIRLISLTDENALSGNEELTVKIKCDKEKNLLHVTDTGVGMTREELVKNLGTIAKSGTSEFLNKMTEAQEDGQSTSELIGQFGVGFYSAFLVADKVIVTSKHNNDTQHIWESDSNEFSVIADPRGNTLGRGTTITLVLKEEASDYLELDTIKNLVKKYSQFINFPIYVWSSKTETVEEPMEEEEAAKEEKEESDDEAAVEEEEEEKKPKTKKVEKTVWDWELMNDIKPIWQRPSKEVEEDEYKAFYKSFSKESDDPMAYIHFTAEGEVTFKSILFVPTSAPRGLFDEYGSKKSDYIKLYVRRVFITDDFHDMMPKYLNFVKGVVDSDDLPLNVSRETLQQHKLLKVIRKKLVRKTLDMIKKIADDKYNDTFWKEFGTNIKLGVIEDHSNRTRLAKLLRFQSSHHPTDITSLDQYVERMKEKQDKIYFMAGSSRKEAESSPFVERLLKKGYEVIYLTEPVDEYCIQALPEFDGKRFQNVAKEGVKFDESEKTKESREAVEKEFEPLLNWMKDKALKDKIEKAVVSQRLTESPCALVASQYGWSGNMERIMKAQAYQTGKDISTNYYASQKKTFEINPRHPLIRDMLRRIKEDEDDKTVLDLAVVLFETATLRSGYLLPDTKAYGDRIERMLRLSLNIDPDAKVEEEPEEEPEETAEDTTEDTEQDEDEEMDVGTDEEEETAKESTAEKDEL

SEQ ID NO: 1644 - protein, 128 aa, Homo sapiens
MQIFVKTLTGKTITLEVEPSDTIENVKAKIQDKEGIPPDQQRLIFAGKQLEDGRTLSDYNIQKESTLHLVLRLRGGIIEPSLRQLAQKYNCDKMICRKCYARLHPRAVNCRKKKCGHTNNLRPKKKVK

SEQ ID NO: 1645 - protein, 201 aa, Homo sapiens
  misc_feature (1)...(201): Xaa = any amino acid or nothing
LSGCFQTRRGSPRRLFSLRGNPTRPFFSCPGCPLAGAPPMCATSVQSNSHVGARGLPTQGGVRKHVFAVGRAGRAHKTRLFSFVGCCFFFFXTGSCSCCPGWSAVAHQGSLXPPTPGFKXPSHLSLSSSWDYRCTTTPGXFLYFLXRGGSHCVAQAGLELLGSSGPPASASQSAGIAGMSHCTQPCILILQIFIFLFTVLK

SEQ ID NO: 1646 - protein, 152 aa, Homo sapiens [sequence omitted]

SEQ ID NO: 1647 - protein, 178 aa, Homo sapiens [sequence omitted]

SEQ ID NO: 1648 - protein, 1304 aa, Homo sapiens
MAKIAKTHEDIEAQIREIQGKKAALDEAQGVGLDSTGYYDQEIYGGSDSRFAGYVTSIAATELEDDDDDYSSSTSLLGQKKPGYHAPVALLNDIPQSTEQYDPFAEHRPPKIADREDEYKKHRRTMIISPERLDPFADGGKTPDPKMNVRTYMDVMREQHLTKEEREIRQQLAEKAKAGELKVVNGAAASQPPSKRKRRWDQTADQTPGATPKKLSSWDQAETPGHTPSLRWDETPGRAKGSETPGATPGSKIWDPTPSHTPAGAATPGRGDTPGHATPGHGGATSSARKNRWDETPKTERDTPGHGSGWAETPRTDRGGDSIGETPTPGASKRKSRWDETPASQMGGSTPVLTPGKTPIGTPAMNMATPTPGHIMSMTPEQLQAWRWEREIDERNRPLSDEELDAMFPEGYKVLPPPAGYVPIRTPARKLTATPTPLGGMTGFHMQTEDRTMKSVNDQPSGNLPFLKPDDIQYFDKLLVDVDESTLSPEEQKERKIMKLLLKIKNGTPPMRKAALRQITDKAREFGAGPLFNQILPLLMSPTLEDQERHLLVKVIDRILYKLDDLVRPYVHKILVVIEPLLIDEDYYARVEGLEIISNLAKAAGLATMISTMRPDIDNMDEYVRNTTARAFAVVASALGIPSLLPFLKAVCKSKKSWQARHTGIKIVQQIAILMGCAILPHLRSLVEIIEHGLVDEQQKVRTISALAIAALAEAATPYGIESFDSVLKPLWKGIRQHRGKGLAAFLKAIGYLIPLMDAEYANYYTREVMLILIREFQSPDEEMKKIVLKVVKQCCGTDGVEANYIKTEILPPFFKHFWQHRMALDRRNYRQLVDTTVELANKVGAAEIISRIVDDLKDEAEQYRKMVMETIEKIMGNLGAADIDHKLEEQLIDGILYAFQEQTTEDSVMLNGFGTVVNALGKRVKPYLPQICGTVLWRLNNKSAKVRQQAADLISRTAVVMKTCQEEKLMGHLGVVLYEYLGEEYPEVLGSILGALKAIVNVIGMHKMTPPIKDLLPRLTPILKNRHEKVQENCIDLVGRIADRGAEYVSAREWMRICFELLELLKAHKKAIRRATVNTFGYIAKAIGPHDVLATLLNNLKVQERQNRVCTTVAIAIVAETCSPFTVLPALMNEYRVPELNVQNGVLKSLSFLFEYIGEMGKDYIYAVTPLLEDALMDRDLVHRQTASAVVQHMSLGVYGFGCEDSLNHLLNYVWPNVFETSPHVIQAVMGALEGLRVAIGPCRMLQYCLQGLFHPARKVRDVYWKIYNSIYIGSQDALIAHYPRIYNDDKNTYIRYELDYIL

SEQ ID NO: 1649 - protein, 119 aa, Homo sapiens
MSRSVALAVLALLSLSGLEAIQRTPKIQVYSRHPAENGKSNFLNCYVSGFHPSDIEVDLLKNGERIEKVEHSDLSFSKDWSFYLLYYTEFTPTEKDEYACRVNHVTLSQPKIVKWDRDM

SEQ ID NO: 1650 - protein, 331 aa, Homo sapiens
MLKLKTKFGSWQTLCKRSNVWQDKCFFKPFFNIDQISPNKKAHPNMEAGPPESGESTDALKLCPHEEFLRLCKERAEEIYPIKERNNRTRLALIICNTEFDHLPPRNGADFDITGMKELLEGLDYSVDVEENLTARDMESALRAFATRPEHKSSDSTFLVLMSHGILEGICGTVHDEKKPDVLLYDTIFQIFNNRNCLSLKDKPKVIIVQACRGANRGELWVRDSPASLEVASSQSSENLEEDAVYKTHVEKDFIAFCSSTPHNVSWRDSTMGSIFITQLITCFQKYSWCCHLEEVFRKVQQSFETPRAKAQMPTIERLSMTRYFYLFPGN

SEQ ID NO: 1651 - protein, 192 aa, Homo sapiens [sequence omitted]

SEQ ID NO: 1652 - protein, 143 aa, Homo sapiens [sequence omitted]

SEQ ID NO: 1653 - protein, 81 aa, Homo sapiens
MLIKVKTLTGKEIEIDIEPTDKVERIKERVEEKEGIPPQQQRLIYSGKQMNDEKTAADYKILGGSVLHLVLALRGGGGLRQ

SEQ ID NO: 1654 - protein, 488 aa, Homo sapiens
MAPAAWLRSAAARALLPPMLLLLLQPPPLLARALPPDVHHLHAERRGPQPWHAALPSSPAPAPATQEAPRPASSLRPPRCGVPDPSDGLSARNRQKRFVLSGGRWEKTDLTYRILRFPWQLVQEQVRQTMAEALKVWSDVTPLTFTEVHEGRADIMIDFARYWHGDDLPFDGPGGILAHAFFPKTHREGDVHFDYDETWTIGDDQGTDLLQVAAHEFGHVLGLQHTTAAKALMSAFYTFRYPLSLSPDDCRGVQHLYGQPWPTVTSRTPALGPQAGIDTNEIAPLEPDAPPDACEASFDAVSTIRGELFFFKAGFVWRLRGGQLQPGYPALASRHWQGLPSPVDAAFEDAQGHIWFFQGAQYWVYDGEKPVLGPAPLTELGLVRFPVHAALVWGPEKNKIYFFRGRDYWRFHPSTRRVDSPVPRRATDWRGVPSEIDAAFQDADGYAYFLRGRLYWKFDPVKVKALEGFPRLVGPDFFGCAEPANTFL

SEQ ID NO: 1655 - protein, 96 aa, Homo sapiens
MPGPTPSGTNVGSSGRSPSKAVAARAAGSTVRQRKNASCGTRSAGRTTSAGTGGMWRFYTEDSPGLKVGPVPVLVMSLLFIASVFMLHIWGKYTRS

SEQ ID NO: 1656 - protein, 134 aa, Homo sapiens
ALKEELGGHIGKRTLVAGKWHAQRPEVRVRGDGTLEEQDESQQVRAQWRVGTNWGPDLRVCAPAELMFLETSALTGENVEEAFLKCARTILNKIDSGELDPERMGSGIQYGDASLRQLRQPRSAQAVAPQPCGC

SEQ ID NO: 1657 - protein, 1122 aa, Homo sapiens
MNSPNESDGMSGREPSLEILPRTSLHSIPVTVEVKPVLPRAMPSSMGGGGGGSPSPVELRGALVGSVDPTLREQQLQQELLALKQQQQLQKQLLFAEFQKQHDHLTRQHEVQLQKHLKQQQEMLAAKQQQEMLAAKRQQELEQQRQREQQRQEELEKQRLEQQLLILRNKEKSKESAIASTEVKLRLQEFLLSKSKEPTPGGLNHSLPQHPKCWGAHHASLDQSSPPQSGPPGTPPSYKLPLPGPYDSRDDFPLRKTASEPNLKVRSRLKQKVAERRSSPLLRRKDGTVISTFKKRAVEITGAGPGASSVCNSAPGSGPSSPNSSHSTIAENGFTGSVPNIPTEMLPQHRALPLDSSPNQFSLYTSPSLPNISLGLQATVTVTNSHLTASPKLSTQQEAERQALQSLRQGGTLTGKFMSTSSIPGCLLGVALEGDGSPHGHASLLQHVLLLEQARQQSTLIAVPLHGQSPLVTGERVATSMRTVGKLPRHRPLSRTQSSPLPQSPQALQQLVMQQQHQQFLEKQKQQQLQLGKILTKTGELPRQPTTHPEETEEELTEQQEVLLGEGALTMPREGSTESESTQEDLEEEDEEEDGEEEEDCIQVKDEEGESGAEEGPDLEEPGAGYKKLFSDAQPLQPLQVYQAPLSLATVPHQALGRTQSSPAAPGGMKSPPDQPVKHLFTTGVVYDTFMLKHQCMCGNTHVHPEHAGRIQSIWSRLQETGLLSKCERIRGRKATLDEIQTVHSEYHTLLYGTSPLNRQKLDSKKLLGPISQKMYAVLPCGGIGVDSDTVWNEMHSSSAVRMAVGCLLELAFKVAAGELKNGFAIIRPPGHHAEESTAMGFCFFNSVAITAKLLQQKLNVGKVLIVDWDIHHGNGTQQAFYNDPSVLYISLHRYDNGNFFPGSGAPEEVGGGPGVGYNVNVAWTGGVDPPIGDVEYLTAFRTVVMPIAHEFSPDVVLVSAGFDAVEGHLSPLGGYSVTARCFGHLTRQLMTLAGGRVVLALEGGHDLTAICDASEACVSALLSVELQPLDEAVLQQKPNINAVATLEKVIEIQSKHWSCVQKFAAGLGRSLREAQAGETEEAETVSAMALLSVGAEQAQAAAAREHSPRPAEEPMEQEPAL

SEQ ID NO: 1658 - protein, 777 aa, Homo sapiens
MLPRPLRLLLDTSPPGGVVLSSFRSRDPEEGGGPGGLVVGGGQEEEEEEEEEAPVSVWDEEEDGAVFTVTSRQYRPLDPLVPMPPPRSSRRLRAGTLEALVRHLLDTRTSGTDVSFMSAFLATHRAFTSTPALLGLMADRLEALESHPTDELERTTEVAISVLSTWLASHPEDFGSEAKGQLDRLESFLLQTGYAAGKGVGGGSADLIRNLRSRVDPQAPDLPKPLALPGDPPADPTDVLVFLADHLAEQLTLLDAELFLNLIPSQCLGGLWGHRDRPGHSHLCPSVRATVTQFNKVAGAVVSSVLGATSTGEGPGEVTIRPLRPPQRARLLEKWIRVAEECRLLRNFSSVYAVVSALQSSPIHRLRAAWGEATRDSLRVFSSLCQIFSEEDNYSQSRELLVQEVKLQSPLEPHSKKAPRSGSRGGGVVPYLGTFLKDLVMLDAASKDELENGYINFDKRRKEFAVLSELRRLQNECRGYNLQPDHDIQRWLQGLRPLTEAQSHRVSCEVEPPGSSDPPAPRVLRPTLVISQWTEVLGSVGVPTPLVSCDRPSTGGDEAPTTPAPLLTRLAQHMKWPSVSSLDSALESSPSLHSPADPSHLSPPASSPRPSRGHRRSASCGSPLSGGAEEASGGTGYGGEGSGPGASDCRIIRVQMELGEDGSVYKSILVTSQDKAPSVISRVLKKNNRDSAVASEYELVQLLPGERELTIPASANVFYAMDGASHDFLLRQRRRSSTATPGVTSGPSASGTPPSEGGGGSFPRIKATGRKIARALF

SEQ ID NO: 1659 - protein, 250 aa, Homo sapiens
MSIFTPTNQIRLTNVAVVRMKRAGKRFEIACYKNKVVGWRRAWEKDLDEVLQTHSVFVNVSKGQVAKKEDLISAFGTDDQTEICKQILAKGEVQVSDKERHTQLGQMFRDIATFVADKCVNPETKGPYTVILIERAMKDIHYLVKPNKSTKQQALEVIKQLKEKMKIERAHMRLRFILPVNEGKKLKEKLKPLIKVIESEDYGQQLEIVCLIDPGCFREIDELIKKETKGKGSLEVLNLKDVEEGDEKFE

SEQ ID NO: 1660 - protein, 264 aa, Homo sapiens
MESGFTSKDTYLSHFNPRDYLEKYYKFGSRHSAESQILKHLLKNLFKIFCLDGVKGDLLIDIGSGPTIYQLLSACESFKEIVVTDYSDQNLQELEKWLKKEPEAFDWSPVVTYVCDLEGNRVKGPEKEEKLRQAVKQVLKCDVTQSQPLGAVPLPPADCVLSTLCLDAACPDLPTYCRALRNLGSLLKPGGFLVIMDALKSSYYMIGEQKFSSLPLGREAVEAAVKEAGYTIEWFEVISQSYSSTMANNEGLFSLVARKLSRPL

SEQ ID NO: 1661 - protein, 243 aa, Homo sapiens
MAVQISKKRKFVADGIFKAELNEFLTRELAEDGYSGVEVRVTPTRTEIIILATRTQNVLGEKGRRIRELTAVVQKRFGFPEGSVELYAEKVATRGLCAIAQAESLRYKLLGGLAVRRACYGVLRFIMESGAKGCEVVVSGKLRGQRAKSMKFVDGLMIHSGDPVNYYVDTAVRHVLLRQGVLGIKVKIMLPWDPTGKIGPKKPLPDHVSIVEPKDEILPTTPISEQKGGKPEPPAMPQPVPTA

SEQ ID NO: 1662 - protein, 747 aa, Homo sapiens
MTSFQEVPLQTSNFAHVIFQNVAKSYLPNAHLECHYTLTPYIHPHPKDWVGIFKVGWSTARDYYTFLWSPMPEHYVEGSTVNCVLAFQGYYLPNDDGEFYQFCYVTHKGEIRGASTPFQFRASSPVEELLTMEDEGNSDMLVVTTKAGLLELKIEKTMKEKEELLKLIAVLEKETAQLREQVGRMERELNHEKERCDQLQAEQKGLTEVTQSLKMENEEFKKRFSDATSKAHHVEEDIVSVTHKAIEKETELDSLKDKLKKAQHEREQLECQLKTEKDEKELYKVHLKNTEIENTKLMSEVQTLKNLDGNKESVITHFKEEIGRLQLCLAEKENLQRTFLLTTSSKEDTCFLKEQLRKAEEQVQATRQEVVFLAKELSDAVNVRDRTMADLHTARLENEKVKKQLADAVAELKLNAMKKDQDKTDTLEHELRREVEDLKLRLQMAADHYKEKFKECQRLQKQINKLSDQSANNNNVFTKKTGNQQKVNDASVNTDPATSASTVDVKPSPSAAEADFDIVTKGQVCEMTKEIADKTEKYNKCKQLLQDEKAKCNKYADELAKMELKWKEQVKIAENVKLELAEVQDNYKELKRSLENPAERKMEDGADGAFYPDEIQRPPVRVPSWGLEDNVVCSQPARNFSRPDGLEDSEDSKEDENVPTAPDPPSQHLRGHGTGFCFDSSFDVHKKCPLCELMFPPNYDQSKFEEHVESHWKVCPMCSEQFPPDYDQQVFERHVQTHFDQNVLNFD

SEQ ID NO: 1663 - protein, 121 aa, Homo sapiens
MRIMLLFTAILAFSLAQSFGAVCKEPQEEVVPGGGRSKRDPDLYQLLQRLFKSHSSLEGLLKALSQASTDPKESTSPEKRDMHDFFVGLMGKRSVQPDSPTDVNQENVPSFGILKYPPRAE

SEQ ID NO: 1664 - protein, 419 aa, Homo sapiens
MGPLSAPPCTQHITWKGLLLTASLLNFWNPPTTAQVTIEAQPPKVSEGKDVLLLVHNLPQNLTGYIWYKGQIRDLYHYVTSYVVDGQIIKYGPAYSGRETVYSNASLLIQNVTQEDTGSYTLHIIKRGDGTGGVTGRFTFTLYLETPKPSISSSNFNPREATEAVILTCDPETPDASYLWWMNGQSLPMTHSLQLSETNRTLYLFGVTNYTAGPYECEIRNPVSASRSDPVTLNLLPKLPKPYITINNLNPRENKDVSTFTCEPKSENYTYIWWLNGQSLPVSPRVKRRIENRILILPSVTRNETGPYQCEIRDRYGGIRSDPVTLNVLYGPDLPRIYPSFTYYHSGQNLYLSCFADSNPPAQYSWTINGKFQLSGQKLSIPQITTKHSGLYACSVRNSATGKESSKSVTVRVSDWTLP

SEQ ID NO: 1665 - protein, 201 aa, Homo sapiens
MAAAKDTHEDHDTSTENTDESNHDPQFEPIVSLPEQEIKTLEEDEEELFKMRAKLFRFASENDLPEWKERGTGDVKLLKHKEKGAIRLLMRRDKTLKICANHYITPMMELKPNAGSDRAWVWNTHADFADECPKPELLAIRFLNAENAQKFKTKFEECRKEIEEREKKAGSGKNDHAEKVAEKLEALSVKEETKEDAEEKQ

SEQ ID NO: 1666 - protein, 651 aa, Homo sapiens
MGKKHKKHKSDKHLYEEYVEKPLKLVLKVGGNEVTELSTGSSGHDSSLFEDKNDHDKHKDRKRKKRKKGEKQIPGEEKGRKRRRVKEDKKKRDRDRVENEAEKDLQCHAPVRLDLPPEKPLTSSLAKQEEVEQTPLQEALNQLMRQLQRKDPSAFFSFPVTDFIAPGYSMIIKHPMDFSTMKEKIKNNDYQSIEELKDNFKLMCTNAMIYNKPETIYYKAAKKLLHSGMKILSQERIQSLKQSIDFMADLQKTRKQKDGTDTSQSGEDGGCWQREREDSGDAEAHAFKSPSKENKKKDKDMLEDKFKSNNLEREQEQLDRIVKESGGKLTRRLVNSQCEFERRKPDGTTTLGLLHPVDPIVGEPGYCPVRLGMTTGRLQSGVNTLQGFKEDKRNKVTPVLYLNYGPYSSYAPHYDSTFANISKDDSDLIYSTYGEDSDLPSDFSIHEFLATCQDYPYVMADSLLDVLTKGGHSRTLQEMEMSLPEDEGHTRTLDTAKEMEITEVEPPGRLDSSTQDRLIALKAVTNFGVPVEVFDSEEAEIFQKKLDETTRLLRELQEAQNERLSTRPPPNMICLLGPSYREMHLAEQVTNNLKELAQQVTPGDIVSTYGVRKAMGISIPSPVMENNFVDLTEDTEEPKKTDVAECGPGGS

SEQ ID NO: 1667 - protein, 129 aa, Homo sapiens
  misc_feature (1)...(129): Xaa = any amino acid or nothing
LYLYIQFYILLQRLCFSKGFVFLFIIFFFFFFXDSLALSLRLECSGTISAHCNLLLPGSSDSCSSASRVAGTTGMCHYAQLIFVFLVETGFHHIGQAGLEMLASSDLPASASQSTGITGMNLALRNIFS

SEQ ID NO: 1668 - protein, 441 aa, Homo sapiens
MDAPPGGVESALSCFSFNQDCTSLATGTKAGYKLFSLSSVEQLDQVHGSNEIPDVYIVERLFSSSLVVVVSHTKPRQMNVYHFKKGTEICNYSYSSNILSIRLNRQRLLVCLEESIYIHNIKDMKLLKTLLDIPANPTGLCALSINHSNSYLAYPGSLTSGEIVLYDGNSLKTVCTIAAHEGTLAAITFNASGSKLASASEKGTVIRVFSVPDGQKLYEFRRGMKRYVTISSLVFSMDSQFLCASSNTETVHIFKLEQVTNSRPEEPSTWSGYMGKMFMAATNYLPTQVSDMMHQDRAFATARLNFSGQRNICTLSTIQKLPRLLVASSSGHLYMYNLDPQDGGECVLIKTHRLLGSGTTEENKENDLRPSLPQSYAATVARPSASSASTVPGYSEDGGALRGEVIPEHEFATGPVCLDDENEFPPIILCRGNQKGKTKQS

SEQ ID NO: 1669 - protein, 199 aa, Homo sapiens
MLAYSSVHCFREDKMKFTIVFAGLLGVFLAPALANYNINVNDDNNNAGSGQQSVSVNNEHNVANVDNNNGWDSWNSIWDYGNGFAATRLFQKKTCIVHKMNKEVMPSIQSLDALVKEKKLQGKGPGGPPPKGLMYSVNPNKVDDLSKFGKNIANMCRGIPTYMAEEMQEASLFFYSGTCYTTSVLWIVDISFCGDTVEN

SEQ ID NO: 1670 - protein, 664 aa, Homo sapiens
MKTGLFFLCLLGTAAAIPTNARLLSDHSKPTAETVAPDNTAIPSLRAEDEENEKETAVSTEDDSHHKAEKSSVLKSKEESHEQSAEQGKSSSQELGLKDQEDSDGDLSVNLEYAPSEGTLDIKEDMSEPQEKKLSENTDFLAPGVSSFTDSNQQESITKREENQEQPRNYSHHQLNRSSKHSQGLRDQGNQEQDPNISNGEEEEEKEPGEVGTHNDNQERKTELPREHANSKQEEDNTQSDDILEESDQPTQVSKMQEDEFDQGNQEQEDNSNAEMEEENASNVNKHIQETEWQSQEGKTGLEAISNHKETEEKTVSEALLMEPTDDGNTTPRNHGVDDDGDDDGDDGGTDGPRHSASDDYFIPSQAFLEAERAQSIAYHLKIEEQREKVHENENIGTTEPGEHQEAKKAENSSNEEETSSEGNMRVHAVDSCMSFQCKRGHICKADQQGKPHCVCQDPVTCPPTKPLDQVCGTDNQTYASSCHLFATKCRLEGTKKGHQLQLDYFGACKSIPTCTDFEVIQFPLRMRDWLKNILMQLYEANSEHAGYLNEKQRNKVKKIYLDEKRLLAGDHPIDLLLRDFKKNYHMYVYPVHWQFSELDQHPMDRVLTHSELAPLRASLVPMEHCITRFFEECDPNKDKHITLKEWGHCFGIKEEDIDENLLF

SEQ ID NO: 1671 - protein, 328 aa, Homo sapiens
MARTVVLITGCSSGIGLHLAVRLASDPSQSFKVYATLRDLKTQGRLWEAARALACPPGSLETLQLDVRDSKSVAAARERVTEGRVDVLVCNAGLGLLGPLEALGEDAVASVLDVNVVGTVRMLQAFLPDMKRRGSGRVLVTGSVGGLMGLPFNDVYCASKFALEGLCESLAVLLLPFGVHLSLIECGPVHTAFMEKVLGSPEEVLDRTDIHTFHRFYQYLAHSKQVFREAAQNPEEVAEVFLTALRAPKPTLRYFTTERFLPLLRMRLDDPSGSNYVTAMHREVFGDVPAKAEAGAEAGGGAGPGAEDEAGRSAVGDPELGDPPAAPQ

SEQ ID NO: 1672 - protein, 333 aa, Homo sapiens [sequence omitted]

SEQ ID NO: 1673 - protein, 635 aa, Homo sapiens
MAKKSAENGIYSVSGDEKKGPLIAPGPDGAPAKGDGPVGLGTPGGRLAVPPRETWTRQMDFIMSCVGFAVGLGNVWRFPYLCYKNGGGVFLIPYVLIALVGGIPIFFLEISLGQFMKAGSINVWNICPLFKGLGYASMVIVFYCNTYYIMVLAWGFYYLVKSFTTTLPWATCGHTWNTPDCVEIFRHEDCANASLANLTCDQLADRRSPVIEFWENKVLRLSGGLEVPGALNWEVTLCLLACWVLVYFCVWKGVKSTGKIVYFTATFPYVVLVVLLVRGVLLPGALDGIIYYLKPDWSKLGSPQVWIDAGTQIFFSYAIGLGALTALGSYNRFNNNCYKDAIILALINSGTSFFAGFVVFSILGFMAAEQGVHISKVAESGPGLAFIAYPRAVTLMPVAPLWAALFFFMLLLLGLDSQFVGVEGFITGLLDLLPASYYFRFQREISVALCCALCFVIDLSMVTDGGMYVFQLFDYYSASGTTLLWQAFWECVVVAWVYGADRFMDDIACMIGYRPCPWMKWCWSFFTPLVCMGIFIFNVVYYEPLVYNNTYVYPWWGEAMGWAFALSSMLCVPLHLLGCLLRAKGTMAERWQHLTQPIWGLHHLEYRAQDADVRGLTTLTPVSESSKVVVVESVM

SEQ ID NO: 1674 - protein, 139 aa, Homo sapiens
MSSLPVPYTLPVSLPVGSCVIITGTPILTFVKDPQLEVNFYTGMDEDSDIAFQFRLHFGHPAIMNSCVFGIWRYEEKCYYLPFEDGKPFELCIYVRHKEYKVMVNGQRIYNFAHRFPPASVKMLQVFRDISLTRVLISD

SEQ ID NO: 1675 - protein, 795 aa, Homo sapiens
MSKRHRLDLGEDYPSGKKRAGTDGKDRDRDRDREDRSKDRDRERDRGDREREREKEKEKELRASTNAMLISAGLPPLKASHSAHSTHSAHSTHSTHSAHSTHAGHAGHTSLPQCINPFTNLPHTPRYYDILKKRLQLPVWEYKDRFTDILVRHQSFVLVGETGSGKTTQIPQWCVEYMRSLPGPKRGVACTQPRRVAAMSVAQRVADEMDVMLGQEVGYSIRFEDCSSAKTILKYMTDGMLLREAMNDPLLERYGVIILDEAHERTLATDILMGVLKEVVRQRSDLKVIVMSATLDAGKFQIYFDNCPLLTIPGRTHPVEIFYTPEPERDYLEAAIRTVIQIHMCEEEEGDLLLFLTGQEEIDEACKRIKREVDDLGPEVGDIKIIPLYSTLPPQQQQRIFEPPPPKKQNGAIGRKVVVSTNIAETSLTIDGVVFVIDPGFAKQKVYNPRIRVESLLVTAISKASAQQRAGRAGRTRPGKCFRLYTEKAYKTEMQDNTYPEILRSNLGSVVLQLKKLGIDDLVHFDFMDPPAPETLMRALELLNYLAALNDDGDLTELGSMMAEFPLDPQLAKMVIASCDYNCSNEVLSITAMLSVPQCFVRPTEAKKAADEAKMRFAHIDGDHLTLLNVYHAFKQNHESVQWCYDNFINYRSLMSADNVRQQLSRIMDRFNLPRRSTDFTSRDYYINIRKALVTGYFMQVAHLERTGHYLTVKDNQVVQLHPSTVLDHKPEWVLYNEFVLTTKNYIRTCTDIKPEWLVKIAPQYYDMSNFPQCEAKRQLDRIIAKLQSKEYSQY

SEQ ID NO: 1676 - protein, 132 aa, Homo sapiens [sequence omitted]

SEQ ID NO: 1677 - protein, 222 aa, Homo sapiens
MAGKPKLHYFNGRGRMEPIRWLLAAAGVEFEEKFIGSAEDLGKLRNDGSLMFQQVPMVEIDGMKLVQTRAILNYIASKYNLYGKDIKERALIDMYTEGMADLNEMILLLPLCRPEEKDAKIALIKEKTKSRYFPAFEKVLQSHGQDYLVGNKLSRADISLVELLYYVEELDSSLISNFPLLKALKTRISNLPTVKKFLQPGSPRKPPADAKALEEARKIFRF

SEQ ID NO: 1678 - protein, 252 aa, Homo sapiens
DWTSKVVSLSVSSPQRRGAGGGDRARPCQLPLRKRKCKHCGVLSSVSPTRAPVVPPAGHRALSPAGVLLAVPAMLSLDFLDDVRRMNKRQLYYQVLNFGMIVSSALMIWKGLMVITGSESPIVVVLSGSMEPAFHRGDLLFLTNRVEDPIRVGEIVVFRIEGREIPIVHRVLKIHEKQNGHIKFLTKGDNNAVDDRGLYKQGQHWLEKKDVVGRARGFVPYIGIVTILMNDYPKFKYAVLFLLGLFVLVHRE

SEQ ID NO: 1679 - protein, 107 aa, Homo sapiens
MGRKRLITDSYPVVKRREGPAGHSKGELAPELGEEPQPRDEEEAELELLRQFDLAWQYGPCTGITRLQRWCRAKQMGLEPPPEVWQVLKTHPGDPRFQCSLWHLYPL

SEQ ID NO: 1680 - protein, 434 aa, Homo sapiens
MGRGLWEAWPPAGSSAVAKGNCREEAEGAEDRQPASRRGAGTTAAMAASGPGCRSWCLCPEVPSATFFTALLSLLVSGPRLFLLQQPLAPSGLTLKSEALRNWQVYRLVTYIFVYENPISLLCGAIIIWRFAGNFERTVGTVRHCFFTVIFAIFSAIIFLSFEAVSSLSKLGEVEDARGFTPVAFAMLGVTTVRSRMRRALVFGMVVPSVLVPWLLLGASWLIPQTSFLSNVCGLSIGLAYAHLLLFHRPLRASGAEARSDLPLQPDEEDIRVQVRLRVFSREEGSPEPETEPGAWLLPHTELPPSPVPKPPCVPDAARQWSEAGLLASCTPGHMPTLPPYQPASGLCYVQNHFGPNPTSSSVYPASAGTSLGIQPPTPVNSPGTVYSGALGHQGLQAPRSPPGSPCPERISREVISLGLLKVLPKSLLTKVTY

SEQ ID NO: 1681 - protein, 178 aa, Homo sapiens
HLFLRKCPPLFLIITKRMAAVCPGHHDPVDHLQHSVSVPVLLPTLHPHQGGQVLHHWNLPNSCWSVRDECCGHLHGEAPGVASQLGLLLRFRLHPGLGGLPPGPSQRCHLCDLAETRMRRPDGLSEALSVHREGRKGKQKADKEKRASPKSQTQTKPNRKQWRWGLLLIEDVYNISGL

SEQ ID NO: 1682 - protein, 196 aa, Homo sapiens
YWRKKLRPCNRKMRTSMSEAATRWSCQGSCQKTCFSRVRPWRRRCSCGDSSSRRRRSCCTGSLGPMPRLPSLWPLSLPLRSLSSPHRVQGLGPPRRLKSQLLPRFFWRRQQEPLSSFPGRNEGGSEMEILGVCPVSPGALSYMESPTGFWRPREASSLELAKGISKRRHFLPAPALCPNPRSSEAFPGAVCVTLAI

SEQ ID NO: 1683 - protein, 267 aa, Homo sapiens
  misc_feature (1)...(267): Xaa = any amino acid or nothing
GGGRSSSSTMSTGGDFGNPLRKFKLVFLGEQSVGKTSLITRFMYDSFDNTYQATIGIDFLSKTMYLEDRTIRLQLWDTAGQERFRSLIPSYIRDSAAAVVVYDITNVNSFQQTTKWIDDVRTERGSDVIIMLVGNKTDLADKRQVSIEEGERKAKELNVMFIETSAKAGYNVKQLFRRVAAALPGMESTQDRSREDMIDIKLEKPQEQPVSEGGCSCXSPMSSSTFFRSSLLWPPYSFIDCSVNIGLNLFPSVITYCNSSLLPVSWR

SEQ ID NO: 1684 - protein, 269 aa, Homo sapiens
TEARGRGARSMAPNIYLVRQRISRLGQRMSGFQINLNPLKEPLGFIKVLEWIASIFAFATCGGFKGQTEIQVNCPPAVTENKTVTATFGYPFRLNEASFQPPPGVNICDVNWKDYVLIGDYSSSAQFYVTFAVFVFLYCIAALLLYVGYTSLYLDSRKLPMIDFVVTLVATFLWLVSTSAWAKALTDIKIATGHNIIDELPPCKKKAVLCYFGSVTSMGSLNVSVIFGFLNMILWGGNAWFVYKETSLHSPSNTSAPHSQGGIPPPTGI

SEQ ID NO: 1685 - protein, 827 aa, Homo sapiens
EEPAESAEMGSGARFPSGTLRVRWLLLLGLVGPVLGAARPGFQQTSHLSSYEIITPWRLTRERREAPRPYSKQVSYVIQAEGKEHIIHLERNKDLLPEDFVVYTYNKEGTLITDHPNIQNHCHYRGYVEGVHNSSIALSDCFGLRGLLHLENASYGIEPLQNSSHFEHIIYRMDDVYKEPLKCGVSNKDIEKETAKDEEEEPPSMTQLLRRRRAVLPQTRYVELFIVVDKERYDMMGRNQTAVREEMILLANYLDSMYIMLNIRIVLVGLEIWTNGNLINIVGGAGDVLGNFVQWREKFLITRRRHDSAQLVLKKGFGGTAGMAFVGTVCSRSHAGGINVFGQITVETFASIVAHELGHNLGMNHDDGRDCSCGAKSCIMNSGASGSRNFSSCSAEDFEKLTLNKGGNCLLNIPKPDEAYSAPSCGNKLVDAGEECDCGTPKECELDPCCEGSTCKLKSFAECAYGDCCKDCRFLPGGTLCRGKTSECDVPEYCNGSSQFCQPDVFIQNGYPCQNNKAYCYNGMCQYYDAQCQVIFGSKAKAAPKDCFIEVNSKGDRFGNCGFSGNEYKKCATGNALCGKLQCENVQEIPVFGIVPAIIQTPSRGTKCWGVDFQLGSDVPDPGMVNEGTKCGAGKICRNFQCVDASVLNYDCDVQKKCHGHGVCNSNKNCHCENGWAPPNCETKGYGGSVDSGPTYNEMNTALRDGLLVFFFLIVPLIVCAIFIFIKRDQLWRSYFRKKRSQTYESDGKNQANPSRQPGSVPRHVSPVTPPREVPIYANRFAVPTYAAKQPQQFPSRPPPPQPKVSSQGNLIPARPAPAPPLYSSLT

SEQ ID NO: 1686 - protein, 327 aa, Homo sapiens
LCSPTPTEARAGDAGPAARSRKQNPQSPPCCCVDDTWAQAEVGPVTSCTGFVEGSSRTGGMGSACIKVTKYFLFLFNLIFFILGAVILGFGVWILADKSSFISVLQTSSSSLRMGAYVFIGVGAVTMLMGFLGCIGAVNEVRCLLGLYFAFLLLILIAQVTAGALFYFNMGKLKQEMGGIVTELIRDYNSSREDSLQDAWDYVQAQVKCCGWVSFYNWTDNAELMNRPEVTYPCSCEVKGEEDNSLSVRKGFCEAPGNRTQSGNHPEDWPVYQEGCMEKVQAWLQENLGIILGVGVGVAIIELLGMVLSICLCRHVHSEDYSKVPKY

SEQ ID NO: 1687 - protein, 589 aa, Homo sapiens
GPWRDGHGPSTGEDWRARAATAPCLSQGFLPRLHPVDVMAAPALSWRLPLLILLLPLATSWASAAVNGTSQFTCFYNSRANISCVWSQDGALQDTSCQVHAWPDRRRWNQTCELLPVSQASWACNLILGAPDSQKLTTVDIVTLRVLCREGVRWRVMAIQDFKPFENLRLMAPISLQVVHVETHRCNISWEISQASHYFERHLEFEARTLSPGHTWEEAPLLTLKQKQEWICLETLTPDTQYEFQVRVKPLQGEFTTWSPWSQPLAFRTKPAALGKDTIPWLGHLLVGLSGAFGFIILVYLLINCRNTGPWLKKVLKCNTPDPSKFFSQLSSEHGGDVQKWLSSPFPSSSFSPGGLAPEISPLEVLERDKVTQLLLQQDKVPEPASLSSNHSLTSCFTNQGYFFFHLPDALEIEACQVYFTYDPYSEEDPDEGVAGAPTGSSPQPLQPLSGEDDAYCTFPSRDDLLLFSPSLLGGPSPPSTAPGGSGAGEERMPPSLQERVPRDWDPQPLGPPTPGVPDLVDFQPPPELVLREAGEEVPDAGPREGVSFPWSRPPGQGEFRALNARLPLNTDAYLSLQELQGQDPTHLV

SEQ ID NO: 1688 - protein, 467 aa, Homo sapiens
EAVAGATPRAGGPLCARPLYDACARPPRAALRAGRVSGIPRARLRKKRSAGWGGGWMRAHPGGGRCCPEQEEGESAAGGSGAGGDSAIEQGGQGSALAPSPVSGVRREGARGGGRGRGRWKQAGRGGGVCGRGRGRGRGRGRGRGRGRGRGRPPSGGSGLGGDGGGCGGGGSGGGGAPRREPVPFPSGSAGPGPRGPRATESGKRMDCPALPPGWKKEEVIRKSGLSAGKSDVYYFSPSGKKFRSKPQLARYLGNTVDLSSFDFRTGKMMPSKLQKNKQRLRNDPLNQNKGKPDLNTTLPIRQTASIFKQPVTKVTNHPSNKVKSDPQRMNEQPRQLFWEKRLQGLSASDVTEQIIKTMELPKGLQGVGPGSNDETLLSAVASALHTSSAPITGQVSAAVEKNPAVWLNTSQPLCKAFIVTDEDIRKQEERVQQVRKKLEEALMADILSRAADTEEMDIEMDSGDEA

SEQ ID NO: 1689 - protein, 129 aa, Homo sapiens
PPSFSSGVVTIMSLLNKPKSEMTPEELQKREEEEFNTGPLSVLTQSVKNNTQVLINCRNNKKLLGRVKAFDRHCNMVLENVKEMWTEVPKSGKGKKKSKPVNKDRYISKMFLRGDSVIVVLRNPLIAGK

SEQ ID NO: 1690 - protein, 239 aa, Homo sapiens
TRPMWAGTTPPSPKSRRDPRCLRWLHPGTRRTLCSRPAHPNLLVGRNKRRDALGAGCRILLICEMQLTHQLDLFPECRVTLLLFKDVKNAGDLRRKAMEGTIDGSLINPTVIVDPFQILVAANKAVHLYKLGKMKTRTLSTEIIFNLSPNNNISEALKKFGISANDTSILIVYIEEGEKQINQEYLISQVEGHQVSLKNLPEIMNITEVKKIYKLSSQEESIGTLLDAIICRMSTKDVL

SEQ ID NO: 1691 - protein, 766 aa, Homo sapiens
KKTMHTGGETSACKPSSVRLAPSFSFHAAGLQMAGQMPHSHQYSDRRQPNISDQQVSALSYSDQIQQPLTNQVMPDIVMLQRRMPQTFRDPATAPLRKLSVDLIKTYKHINEVYYAKKKRRHQQGQGDDSSHKKERKVYNDGYDDDNYDYIVKNGEKWMDRYEIDSLIGKGSFGQVVKAYDRVEQEWVAIKIIKNKKAFLNQAQIEVRLLELMNKHDTEMKYYIVHLKRHFMFRNHLCLVFEMLSYNLYDLLRNTNFRGVSLNLTRKFAQQMCTALLFLATPELSIIHCDLKPENILLCNPKRSAIKIVDFGSSCQLGQRIYQYIQSRFYRSPEVLLGMPYDLAIDMWSLGCILVEMHTGEPLFSGANEVDQMNKIVEVLGIPPAHILDQAPKARKFFEKLPDGTWNLKKTKDGKREYKPPGTRKLHNILGVETGGPGGRRAGESGHTVADYLKFKDLILRMLDYDPKTRIQPYYALQHSFFKKTADEGTNTSNSVSTSPAMEQSQSSGTTSSTSSSSGGSSGTSNSGRARSDPTHQHRHSGGHFTAAVQAMDCETHSPQVRQQFPAPLGWSGTEAPTQVTVETHPVQETTFHVAPQQNALHHHHGNSSHHHHHHHHHHHHHGQQALGNRTRPRVYNSPTNSSSTQDSMEVGHSHHSMTSLSSSTTSSSTSSSSTGNQGNQAYQNRPVAANTLDFGQNGAMDVNLTVYSNPRQETGIAGHPTYQFSANTGPAHYMTEGHLTMRQGADREESPMTGVCVQQSPVASS

SEQ ID NO: 1692 - protein, 121 aa, Homo sapiens
MAGKPYSLRGSSHTTGTFLLLSQSSGELQIIKYFKMKFKTEMFLLLLFWRDCMKTHTGMNHRLHVPELSNAQDTNSSASISDKVGFSKAELRMCLAIWTFSPIKQVYKILKIECLNFSIVL

SEQ ID NO: 1693 - protein, 37 aa, Homo sapiens
MEPHGVQLRVVNSSLLPSTRSQLHPLVLLCLNCSSLL

SEQ ID NO: 1694 - protein, 82 aa, Homo sapiens
MCVCGPQPQTGLEKCMVGASGLSPRCPFATSLWGKRLQYSVLGVWAANLACSGFPPCAGHTPRKGPWTRLPRPGLRWMHFPH

SEQ ID NO: 1695 - protein, 45 aa, Homo sapiens
MLWFANFFTYLFLSQSVAFVHISHIGVRQVNTNCYFSRKSYCYEY

SEQ ID NO: 1696 - protein, 39 aa, Homo sapiens
MIHCNGLNSMSLQGSATSQNLSLLSPAGQLSGLAFVKAI

SEQ ID NO: 1697 - protein, 56 aa, Homo sapiens
MGTPRLGKMTALLLISSLDSITLSGKPDGRHPSSADTYTTRLLQSRTQWLHPQRSV

SEQ ID NO: 1698 - protein, 57 aa, Homo sapiens
MIMNTPPIPHSDGKQPEPLPLDSSAPLGQSPTDTSQQGRRAGTFGDSSVRLHRHSES

SEQ ID NO: 1699 - protein, 38 aa, Homo sapiens
MFSKARIQIIPQFLEREIQVKRKNLVCFSAFNNSGGRG

SEQ ID NO: 1700 - protein, 48 aa, Homo sapiens
MNPGNSSSLSYPHYDLNPMIQLQGLGSSEPSPIQTFITSKTKKEEAKC

SEQ ID NO: 1701 - protein, 137 aa, Homo sapiens
LQTPHLEFQEGETIVLRCHSWKDKPLVKVTFFQNGKSKKFSRSDPNFSIPQANHSHSGDYHCTGNIGYTLYSSKPVTITVQAPSSSPMGIIVAVVTGIAVAAIVAAVVALIYCRKKRISANPTNPDEADKVGAENTI

SEQ ID NO: 1702 - protein, 99 aa, Homo sapiens
  misc_feature (1)...(99): Xaa = any amino acid or nothing
MGQAWGASCRLAWVWGLGGGPGACTRPXQWGGEWPELLHPRVLLVNVPRLCTFGWERGLIYFHILKFFSSALEVPSRFPGSSVPLPQTHGHNQPRSSWS

SEQ ID NO: 1703 - protein, 91 aa, Homo sapiens
MLSTSSYPSPPPWHEILGAALEIVFFGCWWGCCWWGFAQLAHCTSLVGVCTAGTLHQSPACCQQGHFPSTGFGEVGALKWEHKAAFCRPGV

SEQ ID NO: 1704 - protein, 35 aa, Homo sapiens
MYLTCKICTVLTSTISLKLAYKYCCIIFFGQKHLD
